(19) United States
(12) Patent Application Publication
(10) Pub. No.: US 2019/0161478 A1
(43) Pub. Date: May 30, 2019

(54) PLANTS HAVING INCREASED TOLERANCE TO HERBICIDES

(71) Applicant: BASF AGRO. B.V., EA Arnhem (NL)

(72) Inventors: Raphael Aponte, Limburgerhoff (DE); Stefan Tresch, Ludwigshafen (DE); Liliana Parra Rapado, Limburgerhof (DE); Tobias Seiser, Limburgerhoff (DE); Jill Marie Paulik, Research Triangle Park, NC (US); Matthias Witschel, Ludwigshafen (DE)

(21) Appl. No.: 16/320,840

(22) PCT Filed: Jul. 26, 2017
(86) PCT No.: PCT/EP2017/068817

§ 371 Date: Jan. 25, 2019

(30) Foreign Application Priority Data
Jul. 27, 2016 (EP) 16181381.1

(51) Int. Cl. C07D 405/12; A01N 43/40; C12N 15/82

(52) U.S. Cl. CPC C07D 405/12; C12N 15/8274; A01N 43/40

(57) ABSTRACT

The present invention refers to a method for controlling undesired vegetation at a plant cultivation site, the method comprising the steps of providing, at said site, a plant that comprises at least one nucleic acid comprising a nucleotide sequence encoding protoporphyrinogen oxidase (PPO) which is resistant or tolerant to a PPO-inhibiting herbicide by applying to said site an effective amount of said herbicide. The invention further refers to plants comprising wild-type or mutated PPO enzymes, and methods of obtaining such plants.

### FIELD OF THE INVENTION

[0001] The present invention relates in general to methods for conferring on plants agricultural level tolerance to herbicides. Particularly, the invention refers to plants having an increased tolerance to PPO-inhibiting herbicides. More specifically, the present invention relates to methods and plants obtained by mutagenesis and cross-breeding and transformation that have an increased tolerance to PPO-inhibiting herbicides.

### BACKGROUND OF THE INVENTION

[0002] Herbicides that inhibit protoporphyrinogen oxidase (hereinafter referred to as Protox or PPO; EC:1.3.3.4), a key enzyme in the biosynthesis of protoporphyrin IX, have been used for selective weed control since the 1960s. PPO catalyzes the last common step in chlorophyll and heme biosynthesis which is the oxidation of protoporphyrinogen IX to protoporphyrin IX. (Matringe et al. 1989. Biochem. 1. 260: 231). PPO-inhibiting herbicides include many different structural classes of molecules (Duke et al. 1991. Weed Sci. 39: 465; Nandihalli et al. 1992. Pesticide Biochem. Physiol. 43: 193; Matringe et al. 1989. FEBS Lett. 245: 35; Yanase and Andoh. 1989. Pesticide Biochem. Physiol. 35: 70). These herbicidal compounds include the diphenylethers {e.g. lactofen, (+−)-2-ethoxy-1-methyl-2-oxoethyl 5-{2-chloro-4-(trifluoromethyl)phenoxy}-2-nitrobenzoate; acifluorfen, 5-{2-chloro-4-(trifluoromethyl)phenoxy}-2-nitrobenzoic acid; its methyl ester; or oxyfluorfen, 2-chloro-1-(3-ethoxy-4-nitrophenoxy)-4-(trifluorobenzene)}, oxidiazoles, (e.g. oxidiazon, 3-{2,4-dichloro-5-(1-methylethoxy)phenyl}-5-(1,1-dimethylethyl)-1,3,4-oxadiazol-2-(3H)-one), cyclic imides (e.g. S-23142, N-(4-chloro-2-fluoro-5-propargyloxyphenyl)-3,4,5,6-tetrahydrophthalimide; chlorophthalim, N-(4-chlorophenyl)-3,4,5,6-tetrahydrophthalimide), phenyl pyrazoles (e.g. TNPP-ethyl, ethyl 2-{1-(2,3,4-trichlorophenyl)-4-nitropyrazolyl-5-oxy}propionate; M&B 39279), pyridine derivatives (e.g. LS 82-556), and phenopylate and its O-phenylpyrrolidino- and piperidinocarbamate analogs. Many of these compounds competitively inhibit the normal reaction catalyzed by the enzyme, apparently acting as substrate analogs.

[0003] Application of PPO-inhibiting herbicides results in the accumulation of protoporphyrinogen IX in the chloroplast and mitochondria, which is believed to leak into the cytosol where it is oxidized by a peroxidase. When exposed to light, protoporphyrin IX causes formation of singlet oxygen in the cytosol and the formation of other reactive oxygen species, which can cause lipid peroxidation and membrane disruption leading to rapid cell death (Lee et al. 1993. Plant Physiol. 102: 881).

[0004] Not all PPO enzymes are sensitive to herbicides which inhibit plant PPO enzymes. Both the Escherichia coli and Bacillus subtilis PPO enzymes (Sasarmen et al. 1993. Can. J. Microbiol. 39: 1155; Dailey et al. 1994. J. Biol. Chem. 269: 813) are resistant to these herbicidal inhibitors. Mutants of the unicellular alga Chlamydomonas reinhardtii resistant to the phenylimide herbicide S-23142 have been reported (Kataoka et al. 1990. J. Pesticide Sci. 15: 449; Shibata et al. 1992. In Research in Photosynthesis, Vol. III, N. Murata, ed. Kluwer:Netherlands. pp. 567-70). At least one of these mutants appears to have an altered PPO activity that is resistant not only to the herbicidal inhibitor on which the mutant was selected, but also to other classes of protox inhibitors (Oshio et al. 1993. Z. Naturforsch. 48c: 339; Sato et al. 1994. In ACS Symposium on Porphyric Pesticides, S. Duke, ed. ACS Press: Washington, D.C.). A mutant tobacco cell line has also been reported that is resistant to the inhibitor S-21432 (Che et al. 1993. Z. Naturforsch. 48c: 350). Auxotrophic E. coli mutants have been used to confirm the herbicide resistance of cloned plant PPO-inhibiting herbicides.

[0005] Three main strategies are available for making plants tolerant to herbicides, i.e. (1) detoxifying the herbicide with an enzyme which transforms the herbicide, or its active metabolite, into non-toxic products, such as, for example, the enzymes for tolerance to bromoxynil or to basta (EP242236, EP337899); (2) mutating the target enzyme into a functional enzyme which is less sensitive to the herbicide, or to its active metabolite, such as, for example, the enzymes for tolerance to glyphosate (EP293356, Padgette S. R. et al., J. Biol. Chem., 266, 33, 1991); or (3) overexpressing the sensitive enzyme so as to produce quantities of the target enzyme in the plant which are sufficient in relation to the herbicide, in view of the kinetic constants of this enzyme, so as to have enough of the functional enzyme available despite the presence of its inhibitor. The third strategy was described for successfully obtaining plants which were tolerant to PPO inhibitors (see e.g. U.S. Pat. No. 5,767,373 or 5,939,602, and patent family members thereof.). In addition, US 2010/0100988 and WO 2007/024739 discloses nucleotide sequences encoding amino acid sequences having enzymatic activity such that the amino acid sequences are resistant to PPO inhibitor herbicidal chemicals, in particular 3-phenyluracil inhibitor specific PPO mutants.

[0006] WO 2012/080975 discloses plants the tolerance of which to a PPO-inhibiting herbicide named (1,5-dimethyl-6-thioxo-3-(2,2,7-trifluoro-3-oxo-4-(prop-2-ynyl)-3,4-dihydro-2H-benzo[b][1,4]oxazin-6-yl)-1,3,5-triazinane-2,4-dione) had been increased by transforming said plants with nucleic acids encoding mutated PPO mutated enzymes. In particular, WO 2012/080975 discloses that the introduction of nucleic acids which code for a mutated PPO of an Amaranthus type II PPO in which the Arginine at position 128 had been replaced by a leucine, alanine, or valine, and the phenylalanine at position 420 had been replaced by a methionine, cysteine, isoleucine, leucine, or threonine, confers increased tolerance/resistance to a benzoxazinone-derivative herbicide. WO 2013/189984 discloses plants the tolerance of which to PPO inhibitors had been increased by transforming said plants with nucleic acids encoding mutated PPO enzymes, in which the Leucine corresponding to position 397 of an Amaranthus type II PPO had been replaced, and the phenylalanine corresponding to position 420 of an Amaranthus type II PPO had been replaced. WO2015/022636 discloses plants the tolerance of which to PPO inhibitors had been increased by transforming said plants with nucleic acids encoding mutated PPO enzymes, in which the Arginine corresponding to position 128 of an Amaranthus type II PPO had been replaced, and the phenylalanine corresponding to position 420 of an Amaranthus type II PPO had been replaced, but the replacement occurred with amino acids, which are different from those disclosed in WO 2012/080975. WO2015/092706 describes PPO polypeptides from a plurality of organisms, which PPO polypeptides had been mutated to comprise the advantageous mutations employed for the Amaranthus type II PPO. WO2015/022640 discloses PPO polypeptides from Alopecurus myosuroides and mutants thereof, which confer tolerance to a broad spectrum of PPO inhibiting herbicides.

[0007] The inventors of the present invention have now surprisingly found that those types of mutants confer increased tolerance/resistance to a new class of PPO inhibitors, hereinafter described as phenylpyridines or phenylpyridine herbicides. Thus, to date, the prior art has not described phenylpyridine tolerant plants containing a mutated PPO nucleic acid according to the present invention, which are tolerant/resistant to a broad selection of phenylpyridines. Therefore, what is needed in the art are crop plants and crop plants having increased tolerance to phenylpyridines and containing at least one wildtype and/or mutated PPO nucleic acid according to the present invention. Also needed are methods for controlling weed growth in the vicinity of such crop plants or crop plants. These compositions and methods would allow for the use of spray over techniques when applying herbicides to areas containing crop plants or crop plants.

### SUMMARY OF THE INVENTION

[0008] The problem is solved by the present invention which refers to a method for controlling undesired vegetation at a plant cultivation site, the method comprising the steps of:
[0009] a) providing, at said site, a plant that comprises at least one nucleic acid comprising a nucleotide sequence encoding a protoporphyrinogen oxidase (PPO) polypeptide which is resistant or tolerant to a “PPO inhibiting herbicide”;
[0010] b) applying to said site an effective amount of said herbicide, wherein the PPO inhibiting herbicide is a phenylpyridine of formula (I)

[chemical structure]

[0011] wherein the variables have the following meanings:
[0012] R¹ halogen, C₁-C₄-haloalkyl or SO₂CH₃;
[0013] R² H, CH₃ or NH₂;
[0014] R³ halogen;
[0015] R⁴ H or halogen;
[0016] R⁵ halogen or CN;
[0017] R⁶ H or CH₃;
[0018] R⁷ C₁-C₆-alkoxy, C₁-C₆-haloalkoxy, C₃-C₆-alkenyloxy, C₃-C₆-alkynyloxy;
[0019] R⁸ OR⁹, SR⁹, NR¹⁰R¹¹, NR⁹S(O)R¹⁰, NR⁹S(O)₂R¹⁰, NR⁹S(O)NR¹⁰R¹¹, or NR⁹S(O)₂NR¹⁰R¹¹,
   [0020] wherein
   [0021] R⁹ is hydrogen, C₁-C₆-alkyl, C₃-C₆-alkenyl, C₃-C₆-alkynyl, C₁-C₆-haloalkyl, C₃-C₆-haloalkenyl, C₃-C₆-haloalkynyl, C₁-C₆-cyanoalkyl, C₁-C₆-alkoxy-C₁-C₆-alkyl, C₁-C₆-alkoxy-C₁-C₆-alkoxy-C₁-C₆-alkyl, di(C₁-C₆-alkoxy)C₁-C₆-alkyl, C₁-C₆-haloalkoxy-C₁-C₆-alkyl, C₃-C₆-alkenyloxy-C₁-C₆-alkyl, C₃-C₆-haloalkenyloxy-C₁-C₆-alkyl, C₃-C₆-alkenyloxy-C₁-C₆-alkoxy-C₁-C₆-alkyl, C₁-C₆-alkylthio-C₁-C₆-alkyl, C₁-C₆-alkylsulfinyl-C₁-C₆-alkyl, C₁-C₆-alkylsulfonyl-C₁-C₆-alkyl, C₁-C₆-alkylcarbonyl-C₁-C₆-alkyl, C₁-C₆-alkoxycarbonyl-C₁-C₆-alkyl, C₁-C₆-haloalkoxycarbonyl-C₁-C₆-alkyl, C₃-C₆-alkenyloxycarbonyl-C₁-C₆-alkyl, amino, (C₁-C₆-alkyl)amino, di(C₁-C₆-alkyl)amino, (C₁-C₆-alkylcarbonyl)amino, amino-C₁-C₆-alkyl, (C₁-C₆-alkyl)amino-C₁-C₆-alkyl, di(C₁-C₆-alkyl)amino-C₁-C₆-alkyl, aminocarbonyl-C₁-C₆-alkyl, (C₁-C₆-alkyl)aminocarbonyl-C₁-C₆-alkyl, di(C₁-C₆-alkyl)aminocarbonyl-C₁-C₆-alkyl, —N═CR¹²R¹³, wherein R¹² and R¹³ independently of one another are H, C₁-C₄-alkyl or phenyl;
      [0022] C₃-C₆-cycloalkyl, C₃-C₆-cycloalkyl-C₁-C₆-alkyl, C₃-C₆-heterocyclyl, C₃-C₆-heterocyclyl-C₁-C₆-alkyl, phenyl, phenyl-C₁-C₄-alkyl or a 5- or 6 membered heteroaryl,
         [0023] wherein each phenyl or heteroaryl ring can be substituted by one to four substituents selected from R¹⁴ or a 3- to 7-membered carbocyclus,
         which carbocyclus optionally has in addition to carbon atoms one or two ring members selected from the group consisting of —N(R¹²)—, —N═N—, —C(═O)—, —O— and —S—, and
         which carbocyclus is optionally substituted with one to four substituents selected from R¹⁴;
[0024] wherein R¹⁴ is halogen, NO₂, CN, C₁-C₄-alkyl, C₁-C₄-haloalkyl, C₁-C₄-alkoxy or C₁-C₄-alkoxy-carbonyl;
   [0025] R¹⁰, R¹¹ independently of one another are R⁹, or together form a 3- to 7-membered carbocyclus,
      [0026] which carbocyclus optionally has in addition to carbon atoms one or two ring members selected from the group consisting of —N(R¹²)—, —N═N—, —C(═O)—, —O— and —S—, and
      [0027] which carbocyclus is optionally substituted with one to four substituents selected from R¹⁴;
[0028] X O or S; and
[0029] Y O or S;
   including their agriculturally acceptable salts, and wherein the effective amount of said herbicide does not kill or inhibit the growth of the herbicide-tolerant plant of a).

[0030] In one embodiment, the herbicide resistant or tolerant PPO polypeptide comprises one or more of the following motifs 1, 2, and/or 3:
[0031] a. Motif 1: SQ[N/K/H]KRYI, wherein the Arg at position 5 within said motif is substituted by any other amino acid;
[0032] b. Motif 2: TLGTLFSS, wherein the Leu at position 2 within said motif is substituted by by any other amino acid;
[0033] c. Motif 3: [F/Y]TTF[V/I]GG, wherein the Phe at position 4 within said motif is substituted by by any other amino acid.

[0034] In another embodiment, the herbicide resistant or tolerant PPO polypeptide comprises a variant of the amino acid sequence of SEQ ID NO: 1, 2, 3, 4, 5, 6, 7, 8, 9, 10, 11, 12, 13, 14, 15, 16, 17, 18, 19, 20, 21, 22, 23, 24, 25, 26, 27, 28, 29, 30, 31, 32, 33, 34, 35, 36, 37, 38, 39, 40, 41, 42, 43, 44, 45, 46, 47, 48, 49, 50, 51, 52, 53, 54, 55, 56, 57, 58, 59, 60, 61, 62, 63, 64, 65, 66, 67, 68, 69, 70, 71, 72, 73, 74, 75, 76, 77, 78, 79, 80, 81, 82, 83, 84, 85, 86, 87, 88, 89, 90, 91, 92, 93, 94, 95, 96, 97, 98, 99, 100, 101, 102, 103, 104, 105, 106, 107, 108, 109, 110, 111, 112, 113, 114, 115, 116, 117, 577, 579, 581, 583, 585, 587, 589, 591, 593, 595, 597, 599, 601, 603, 605, 607, 609, 611, 613, 615, 617, 619, 621, 623, 625, or 627, which variant comprises one or more of the following substitutions:
[0035] a. the amino acid corresponding to Arg128 of SEQ ID NO: 1 is substituted by by any other amino acid.
[0036] b. the amino acid corresponding to Leu397 of SEQ ID NO: 1 is substituted by by any other amino acid.
[0037] c. the amino acid corresponding to Phe420 of SEQ ID NO: 1 is substituted by by any other amino acid.

[0038] In still another embodiment, the herbicide resistant or tolerant PPO polypeptide comprises the amino acid sequence of SEQ ID NO: 265, 266, 267, 268, 269, 270, 271, 272, 273, 274, 275, 276, 277, 278, 279, 280, 281, 282, 283, 284, 285, 286, 287, 288, 289, 290, 291, 292, 293, 294, 295, 296, 297, 298, 299, 300, 301, 302, 303, 304, 305, 306, 307, 308, 309, 310, 311, 312, 313, 314, 315, 316, 317, 318, 319, 320, 321, 322, 323, 324, 325, 326, 327328, 329, 330, 331, 332, 333, 334, 335, 336, 337, 338, 339, 340, 341, 342, 343, 344, 345, 346, 347, 348, 349, 350, 351, 352, 353, 354, 355, 356, 357, 358, 359, 360, 361, 362, 363, 364, 365, 366, 367, 368, 369, 370, 371, 372, 373, 374, 375, 376, 377, 378, 379, 380, 381, 382, 383, 384, 385, 386, 387, 388, 389, 390, 391, 392, 393, 394, 395, 396, 397, 398, 399, 400, 401, 402, 403, 404, 405, 406, 407, 408, 409, 410, 411, 412, 413, 414, 415, 416, 417, 418, 419, 420, 421, 422, 423, 424, 425, 426, 427, 428, 429, 430, 431, 432, 433, 434, 435, 436, 437, 438, 439, 440, 441, 442, 443, 444, 445, 446, 447, 448, 449, 450, 451, 452, 453, 454, 455, 456, 457, 458, 459, 460, 461, 462, 463, 464, 465, 466, 467, 468, 469, 470, 471, 472, 473, 474, 475, 476, 477, 478, 479, 480, 481, 482, 483, 484, 485, 486, 487, 488, 489, 490, 491, 492, 493, 494, 495, 496, 497, 498, 499, 500, 501, 502, 503, 504, 505, 506, 507, 508, 509, 510, 511, 512, 513, 514, 515, 516, 517, 518, 519, 520, 521, 522, 523, 524, 525, 526, 527, 528, 529, 530, 531, 532, 533, 534, 535, 536, 537, 538, 539, 540, 541, 542, 543, 544, 545, 546, 547, 548, 549, 550, 551, 552, 553, 554, 555, 556, 557, 558, 559, 560, 561, 562, 563, 564, 565, or a variant thereof.

[0039] In still another embodiment, the herbicide resistant or tolerant PPO polypeptide comprises the amino acid sequence of SEQ ID NO: 240, 241, 242, 243, 244, 245, 246, 247, 248, 249, 250, 251, 252, 253, 254, 255, 256, 257, 258, 259, 260, 261, or 262.

[0040] Another object refers to a method of identifying a nucleotide sequence encoding a mutated PPO which is resistant or tolerant to a phenylpyridine herbicide, the method comprising:
[0041] a) generating a library of mutated PPO-encoding nucleic acids,
[0042] b) screening a population of the resulting mutated PPO-encoding nucleic acids by expressing each of said nucleic acids in a cell or plant and treating said cell or plant with a phenylpyridine,
[0043] c) comparing the phenylpyridine herbicide-tolerance levels provided by said population of mutated PPO encoding nucleic acids with the phenylpyridine-tolerance level provided by a control PPO-encoding nucleic acid,
[0044] d) selecting at least one mutated PPO-encoding nucleic acid that provides a significantly increased level of tolerance to a phenylpyridine as compared to that provided by the control PPO-encoding nucleic acid.

[0045] In a preferred embodiment, the mutated PPO-encoding nucleic acid selected in step d) provides at least 2-fold as much tolerance to a phenylpyridine as compared to that provided by the control PPO-encoding nucleic acid.

[0046] The resistance or tolerance can be determined by generating a transgenic plant comprising a nucleic acid sequence of the library of step a) and comparing said transgenic plant with a control plant.

[0047] Another object refers to a method of identifying a plant or algae containing a nucleic acid encoding a mutated PPO which is resistant or tolerant to a phenylpyridine, the method comprising:
[0048] a) identifying an effective amount of a phenylpyridine in a culture of plant cells or green algae.
[0049] b) treating said plant cells or green algae with a mutagenizing agent,
[0050] c) contacting said mutagenized cells population with an effective amount of phenylpyridine herbicide, identified in a),
[0051] d) selecting at least one cell surviving these test conditions,
[0052] e) PCR-amplification and sequencing of PPO genes from cells selected in d) and comparing such sequences to wild-type PPO gene sequences, respectively.

[0053] In a preferred embodiment, the mutagenizing agent is ethylmethanesulfonate.

[0054] In another embodiment, the invention refers to a plant cell transformed by and expressing a wild-type or a mutated PPO nucleic acid according to the present invention or a plant which has been mutated to obtain a plant expressing, preferably over-expressing a wild-type or a mutated PPO nucleic acid according to the present invention, wherein expression of said nucleic acid in the plant cell results in increased resistance or tolerance to a phenylpyridine as compared to a wild type variety of the plant cell.

[0055] In another embodiment, the invention refers to a plant that expresses a mutagenized or recombinant mutated PPO polypeptide, and wherein said mutated PPO confers upon the plant increased phenylpyridine tolerance as compared to the corresponding wild-type variety of the plant when expressed therein.

[0056] In another embodiment, the invention refers to a plant comprising a plant cell according to the present invention, wherein expression of the nucleic acid in the plant results in the plant's increased resistance to phenylpyridine herbicide as compared to a wild type variety of the plant.

[0057] The plants of the present invention can be transgenic or non-transgenic.

[0058] Preferably, the expression of the nucleic acid of the invention in the plant results in the plant's increased resistance to phenylpyridine herbicides as compared to a wild type variety of the plant.

[0059] In another embodiment, the invention refers to a method for growing the plant according to the present invention while controlling weeds in the vicinity of said plant, said method comprising the steps of:
[0060] a) growing said plant; and
[0061] b) applying a herbicide composition comprising a phenylpyridine herbicide to the plant and weeds, wherein the herbicide normally inhibits protoporphyrinogen oxidase, at a level of the herbicide that would inhibit the growth of a corresponding wild-type plant.

[0062] In another embodiment, the invention refers to a seed produced by a transgenic plant comprising a plant cell of the present invention, or to a seed produced by the non-transgenic plant that expresses a mutagenized PPO polypeptide, wherein the seed is true breeding for an increased resistance to a phenylpyridine herbicide as compared to a wild type variety of the seed.

[0063] In another embodiment, the invention refers to a method of producing a transgenic plant cell with an increased resistance to a phenylpyridine herbicide as compared to a wild type variety of the plant cell comprising, transforming the plant cell with an expression cassette comprising a wild-type or a mutated PPO nucleic acid.

[0064] In another embodiment, the invention refers to a method of producing a transgenic plant comprising, (a) transforming a plant cell with an expression cassette comprising a wild-type or a mutated PPO nucleic acid, and (b) generating a plant with an increased resistance to phenylpyridine herbicide from the plant cell.

[0065] Preferably, the expression cassette further comprises a transcription initiation regulatory region and a translation initiation regulatory region that are functional in the plant.

[0066] In another embodiment, the invention relates to using the mutated PPO of the invention as selectable marker. The invention provides a method of identifying or selecting a transformed plant cell, plant tissue, plant or part thereof comprising a) providing a transformed plant cell, plant tissue, plant or part thereof, wherein said transformed plant cell, plant tissue, plant or part thereof comprises an isolated nucleic acid encoding a mutated PPO polypeptide of the invention as described hereinafter, wherein the polypeptide is used as a selection marker, and wherein said transformed plant cell, plant tissue, plant or part thereof may optionally comprise a further isolated nucleic acid of interest; b) contacting the transformed plant cell, plant tissue, plant or part thereof with at least one PPO-inhibiting inhibiting compound; c) determining whether the plant cell, plant tissue, plant or part thereof is affected by the inhibitor or inhibiting compound; and d) identifying or selecting the transformed plant cell, plant tissue, plant or part thereof.

[0067] The invention is also embodied in purified mutated PPO proteins that contain the mutations described herein, which are useful in molecular modeling studies to design further improvements to herbicide tolerance. Methods of protein purification are well known, and can be readily accomplished using commercially available products or specially designed methods, as set forth for example, in Protein Biotechnology, Walsh and Headon (Wiley, 1994).

[0068] In another embodiment, the invention relates to a combination useful for weed control, comprising (a) a polynucleotide encoding a mutated PPO polypeptide according to the present invention, which polynucleotide is capable of being expressed in a plant to thereby provide to that plant tolerance to a phenylpyridine herbicide; and (b) a phenylpyridine herbicide.

[0069] In another embodiment, the invention relates to a process for preparing a combination useful for weed control comprising (a) providing a polynucleotide encoding a mutated PPO polypeptide according to the present invention, which polynucleotide is capable of being expressed in a plant to thereby provide to that plant tolerance to a phenylpyridine herbicide; and (b) providing a phenylpyridine herbicide.

[0070] In a preferred embodiment, said step of providing a polynucleotide comprises providing a plant containing the polynucleotide.

[0071] In another preferred embodiment, said step of providing a polynucleotide comprises providing a seed containing the polynucleotide.

[0072] In another preferred embodiment, said process further comprises a step of applying the phenylpyridine herbicide to the seed.

[0073] In another embodiment, the invention relates to the use of a combination useful for weed control, comprising (a) a polynucleotide encoding a mutated PPO polypeptide according to the present invention, which polynucleotide is capable of being expressed in a plant to thereby provide to that plant tolerance to a phenylpyridine herbicide; and (b) a phenylpyridine herbicide, to control weeds at a plant cultivation site.

### BRIEF DESCRIPTION OF THE DRAWINGS

[0074] FIG. 1 shows transgenic T2 Arabidopsis plants, four weeks old, were sprayed in the greenhouse with the indicated amount of methyl 2-[2-chloro-5-[3-chloro-5-(trifluoromethyl)-2-pyridyl]-4-fluoro-phenoxy]-2-methoxy-acetate+1% (v/v) MSO. AMATU=Amaranthus tuberculatum; ALOMY=Alopecurus myosuroides

[0075] FIG. 1A:

[0076] 1=wildtype (non-transgenic)

[0077] 2=AMATU_PPO2_R128M_F420V

[0078] 3=AMATU_PPO2_R128M_F420I

[0079] 4=AMATU_PPO2_R128M_F420L

[0080] 5=AMATU_PPO2_R128M_F420M

[0081] 6=ALOMY_PPO2_F438V

[0082] 7=ALOMY_PPO2_F438I

[0083] 8=ALOMY_PPO2_F438M

[0084] 9=ALOMY_PPO2_R137L_F438V

[0085] FIG. 1B

[0086] 10=ALOMY_PPO2_R137L_F438L

[0087] 11=ALOMY_PPO2_R137L_F438M

[0088] 12=AMATU_PPO2_L397E_F420V

[0089] 13=AMATU_PPO2_L397E_F420M

[0090] 14=AMATU_PPO2_L397Q_F420V

[0091] 15=AMATU_PPO2_L397Q_F420M

[0092] 16=AMATU_PPO2_L397C_F420M

[0093] 17=AMATU_PPO2_L397G_F420M

[0094] FIG. 1C

[0095] 18=AMATU_PPO2_R128L_F420L

[0096] 19=AMATU_PPO2_R128I_F420V

[0097] 20=ALOMY_PPO2_L415A_F438M

[0098] 21=ALOMY_PPO2_L415C_F438M

[0099] 22=ALOMY_PPO2_L415G_F438M

[0100] 23=ALOMY_PPO2_L415E_F438M

[0101] 24=ALOMY_PPO2_L415Q_F438M

[0102] 25=hemG_tplAMATU_PPO2

[0103] FIG. 1D

[0104] 1=wildtype (non-transgenic)

[0105] 2=AMATU_PPO2_R128A_F420V

[0106] 3=AMATU_PPO2_L397D_F420V

[0107] 4=Arabidopsis thaliana_PPO1_S305L_Y426M

[0108] FIG. 2A: T2 soybean events were transformed with the indicated Amaranthus PPO2 variant. Greenhouse grown plants at the V2 stage were sprayed with the indicated amount of herbicide methyl 2-[2-chloro-5-[3-chloro-5-(trifluoromethyl)-2-pyridyl]-4-fluoro-phenoxy]-2-methoxy-acetate (herbicide 1)+1% v/v methylated seed oil. Images were taken 3 days after treatment and are representative of replicates.

[0109] FIG. 2B: T2 soybean events were transformed with the indicated Amaranthus PPO2 variant. Greenhouse grown plants at the V2 stage were sprayed with the indicated amount of herbicide prop-2-ynyl 2-[2-chloro-5-[3-chloro-5-(trifluoromethyl)-2-pyridyl]-4-fluoro-phenoxy]-2-methoxy-acetate (herbicide 2)+1% v/v methylated seed oil. Images were taken 3 days after treatment and are representative of replicates.

[0110] FIG. 2C: T2 soybean events were transformed with the indicated Amaranthus PPO2 variant. Greenhouse grown plants at the V2 stage were sprayed with the indicated amount of herbicide prop-2-ynyl 2-[2-chloro-5-[3-chloro-5-(trifluoromethyl)-2-pyridyl]-4-fluoro-phenoxy]-2-methoxy-acetate (herbicide 2)+1% v/v methylated seed oil. Images were taken 3 days after treatment and are representative of replicates.

[0111] FIG. 2D: T2 maize events were transformed with the Amaranthus PPO2 variants: (1) R128A F420I; (2) R128A F420I; (3) L397E F420M; (4) L397D F420M; (5) Untransformed. Greenhouse grown plants at the V2 stage were sprayed with the indicated amount of herbicide methyl 2-[2-chloro-5-[3-chloro-5-(trifluoromethyl)-2-pyridyl]-4-fluoro-phenoxy]-2-methoxy-acetate (herbicide 1)+1% v/v methylated seed oil. Images were taken 3 days after treatment

### DETAILED DESCRIPTION

[0112] The articles “a” and “an” are used herein to refer to one or more than one (i.e., to at least one) of the grammatical object of the article. By way of example, “an element” means one or more elements.

[0113] As used herein, the word “comprising,” or variations such as “comprises” or “comprising,” will be understood to imply the inclusion of a stated element, integer or step, or group of elements, integers or steps, but not the exclusion of any other element, integer or step, or group of elements, integers or steps.

[0114] The inventors of the present invention have found, that the tolerance or resistance of a plant to a phenylpyridine herbicide could be remarkably increased by overexpressing a nucleic acid encoding PPO polypeptides described hereinafter.

[0115] The present invention refers to a method for controlling undesired vegetation at a plant cultivation site, the method comprising the steps of:
[0116] a) providing, at said site, a plant that comprises at least one nucleic acid comprising a nucleotide sequence encoding a protoporphyrinogen oxidase (mutated PPO) which is resistant or tolerant to a PPO-inhibiting herbicide,
[0117] b) applying to said site an effective amount of said herbicide, wherein the PPO inhibiting herbicide is a phenylpyridine of formula (I)×

[chemical structure]

[0118] wherein the variables have the following meanings:
[0119] R¹ halogen, C₁-C₄-haloalkyl or SO₂CH₃;
[0120] R² H, CH₃ or NH₂;
[0121] R³ halogen;
[0122] R⁴ H or halogen;
[0123] R⁵ halogen or CN;
[0124] R⁶ H or CH₃;
[0125] R⁷ C₁-C₆-alkoxy, C₁-C₆-haloalkoxy, C₃-C₆-alkenyloxy, C₃-C₆-alkynyloxy;
[0126] R⁸ OR⁹, SR⁹, NR¹⁰R¹¹, NR⁹S(O)R¹⁰, NR⁹S(O)₂R¹⁰, NR⁹S(O)NR¹⁰R¹¹, or NR⁹S(O)₂NR¹⁰R¹¹,
   [0127] wherein
   [0128] R⁹ is hydrogen, C₁-C₆-alkyl, C₃-C₆-alkenyl, C₃-C₆-alkynyl, C₁-C₆-haloalkyl, C₃-C₆-haloalkenyl, C₃-C₆-haloalkynyl, C₁-C₆-cyanoalkyl, C₁-C₆-alkoxy-C₁-C₆-alkyl, C₁-C₆-alkoxy-C₁-C₆-alkoxy-C₁-C₆-alkyl, di(C₁-C₆-alkoxy)C₁-C₆-alkyl, C₁-C₆-haloalkoxy-C₁-C₆-alkyl, C₃-C₆-alkenyloxy-C₁-C₆-alkyl, C₃-C₆-haloalkenyloxy-C₁-C₆-alkyl, C₃-C₆-alkenyloxy-C₁-C₆-alkoxy-C₁-C₆-alkyl, C₁-C₆-alkylthio-C₁-C₆-alkyl, C₁-C₆-alkylsulfinyl-C₁-C₆-alkyl, C₁-C₆-alkylsulfonyl-C₁-C₆-alkyl, C₁-C₆-alkylcarbonyl-C₁-C₆-alkyl, C₁-C₆-alkoxycarbonyl-C₁-C₆-alkyl, C₁-C₆-haloalkoxycarbonyl-C₁-C₆-alkyl, C₃-C₆-alkenyloxycarbonyl-C₁-C₆-alkyl, amino, (C₁-C₆-alkyl)amino, di(C₁-C₆-alkyl)amino, (C₁-C₆-alkylcarbonyl)amino, amino-C₁-C₆-alkyl, (C₁-C₆-alkyl)amino-C₁-C₆-alkyl, di(C₁-C₆-alkyl)amino-C₁-C₆-alkyl, aminocarbonyl-C₁-C₆-alkyl, (C₁-C₆-alkyl)aminocarbonyl-C₁-C₆-alkyl, di(C₁-C₆-alkyl)aminocarbonyl-C₁-C₆-alkyl, —N═CR¹²R¹³, wherein R¹² and R¹³ independently of one another are H, C₁-C₄-alkyl or phenyl;
      [0129] C₃-C₆-cycloalkyl, C₃-C₆-cycloalkyl-C₁-C₆-alkyl, C₃-C₆-heterocyclyl, C₃-C₆-heterocyclyl-C₁-C₆-alkyl, phenyl, phenyl-C₁-C₄-alkyl or a 5- or 6 membered heteroaryl,
         [0130] wherein each phenyl or heteroaryl ring can be substituted by one to four substituents selected from R¹⁴ or a 3- to 7-membered carbocyclus,
         which carbocyclus optionally has in addition to carbon atoms one or two ring members selected from the group consisting of —N(R¹²)—, —N═N—, —C(═O)—, —O— and —S—, and
         which carbocyclus is optionally substituted with one to four substituents selected from R¹⁴;
         wherein R¹⁴ is halogen, NO₂, CN, C₁-C₄-alkyl, C₁-C₄-haloalkyl, C₁-C₄-alkoxy or C₁-C₄-alkoxy-carbonyl;
   [0131] R¹⁰, R¹¹ independently of one another are R⁹, or together form a 3- to 7-membered carbocyclus,
      [0132] which carbocyclus optionally has in addition to carbon atoms one or two ring members selected from the group consisting of —N(R¹²)—, —N═N—, —C(═O)—, —O— and —S—, and
      [0133] which carbocyclus is optionally substituted with one to four substituents selected from R¹⁴;
[0134] X O or S; and
[0135] Y O or S;
   including their agriculturally acceptable salts, and wherein the effective amount of said herbicide does not kill or inhibit the growth of the herbicide-tolerant plant of a).

[0136] The term “control of undesired vegetation” is to be understood as meaning the killing of weeds and/or otherwise retarding or inhibiting the normal growth of the weeds. Weeds, in the broadest sense, are understood as meaning all those plants which grow in locations where they are undesired, e.g. (crop) plant cultivation sites. The weeds of the present invention include, for example, dicotyledonous and monocotyledonous weeds.

[0137] Dicotyledonous weeds include, but are not limited to, weeds of the genera: Sinapis, Lepidium, Galium, Stellaria, Matricaria, Anthemis, Galinsoga, Chenopodium, Urtica, Senecio, Amaranthus, Portulaca, Xanthium, Convolvulus, Ipomoea, Polygonum, Sesbania, Ambrosia, Cirsium, Carduus, Sonchus, Solanum, Rorippa, Rotala, Lindernia, Lamium, Veronica, Abutilon, Emex, Datura, Viola, Galeopsis, Papaver, Centaurea, Trifolium, Ranunculus, and Taraxacum. Monocotyledonous weeds include, but are not limited to, weeds of of the genera: Echinochloa, Setaria, Panicum, Digitaria, Phleum, Poa, Festuca, Eleusine, Brachiaria, Lolium, Bromus, Avena, Cyperus, Sorghum, Agropyron, Cynodon, Monochoria, Fimbristyslis, Sagittaria, Eleocharis, Scirpus, Paspalum, Ischaemum, Sphenoclea, Dactyloctenium, Agrostis, Alopecurus, and Apera. In addition, the weeds of the present invention can include, for example, crop plants that are growing in an undesired location. For example, a volunteer maize plant that is in a field that predominantly comprises soybean plants can be considered a weed, if the maize plant is undesired in the field of soybean plants.

[0138] The term “plant” is used in its broadest sense as it pertains to organic material and is intended to encompass eukaryotic organisms that are members of the Kingdom Plantae, examples of which include but are not limited to vascular plants, vegetables, grains, flowers, trees, herbs, bushes, grasses, vines, ferns, mosses, fungi and algae, etc, as well as clones, offsets, and parts of plants used for asexual propagation (e.g. cuttings, pipings, shoots, rhizomes, underground stems, clumps, crowns, bulbs, corms, tubers, rhizomes, plants/tissues produced in tissue culture, etc.). The term “plant” further encompasses whole plants, ancestors and progeny of the plants and plant parts, including seeds, shoots, stems, leaves, roots (including tubers), flowers, florets, fruits, pedicles, peduncles, stamen, anther, stigma, style, ovary, petal, sepal, carpel, root tip, root cap, root hair, leaf hair, seed hair, pollen grain, microspore, cotyledon, hypocotyl, epicotyl, xylem, phloem, parenchyma, endosperm, a companion cell, a guard cell, and any other known organs, tissues, and cells of a plant, and tissues and organs, wherein each of the aforementioned comprise the gene/nucleic acid of interest. The term “plant” also encompasses plant cells, suspension cultures, callus tissue, embryos, meristematic regions, gametophytes, sporophytes, pollen and microspores, again wherein each of the aforementioned comprises the gene/nucleic acid of interest.

[0139] Plants that are particularly useful in the methods of the invention include all plants which belong to the superfamily Viridiplantae, in particular monocotyledonous and dicotyledonous plants including fodder or forage legumes, ornamental plants, food crops, trees or shrubs selected from the list comprising Acer spp., Actinidia spp., Abelmoschus spp., Agave sisalana, Agropyron spp., Agrostis stolonifera, Allium spp., Amaranthus spp., Ammophila arenaria, Ananas comosus, Annona spp., Apium graveolens, Arachis spp, Artocarpus spp., Asparagus officinalis, Avena spp. (e.g. Avena sativa, Avena fatua, Avena byzantina, Avena fatua var. sativa, Avena hybrida), Averrhoa carambola, Bambusa sp., Benincasa hispida, Bertholletia excelsea, Beta vulgaris, Brassica spp. (e.g. Brassica napus, Brassica rapa ssp. [canola, oilseed rape, turnip rape]), Cadaba farinosa, Camellia sinensis, Canna indica, Cannabis sativa, Capsicum spp., Carex elata, Carica papaya, Carissa macrocarpa, Carya spp., Carthamus tinctorius, Castanea spp., Ceiba pentandra, Cichorium endivia, Cinnamomum spp., Citrullus lanatus, Citrus spp., Cocos spp., Coffea spp., Colocasia esculenta, Cola spp., Corchorus sp., Coriandrum sativum, Corylus spp., Crataegus spp., Crocus sativus, Cucurbita spp., Cucumis spp., Cynara spp., Daucus carota, Desmodium spp., Dimocarpus longan, Dioscorea spp., Diospyros spp., Echinochloa spp., Elaeis (e.g. Elaeis guineensis, Elaeis oleifera), Eleusine coracana, Eragrostis tef, Erianthus sp., Eriobotrya japonica, Eucalyptus sp., Eugenia uniflora, Fagopyrum spp., Fagus spp., Festuca arundinacea, Ficus carica, Fortunella spp., Fragaria spp., Ginkgo biloba, Glycine spp. (e.g. Glycine max, Soja hispida or Soja max), Gossypium hirsutum, Helianthus spp. (e.g. Helianthus annuus), Hemerocallis fulva, Hibiscus spp., Hordeum spp. (e.g. Hordeum vulgare), Ipomoea batatas, Juglans spp., Lactuca sativa, Lathyrus spp., Lens culinaris, Linum usitatissimum, Litchi chinensis, Lotus spp., Luffa acutangula, Lupinus spp., Luzula sylvatica, Lycopersicon spp. (e.g. Lycopersicon esculentum, Lycopersicon lycopersicum, Lycopersicon pyriforme), Macrotyloma spp., Malus spp., Malpighia emarginata, Mammea americana, Mangifera indica, Manihot spp., Manilkara zapota, Medicago sativa, Melilotus spp., Mentha spp., Miscanthus sinensis, Momordica spp., Morus nigra, Musa spp., Nicotiana spp., Olea spp., Opuntia spp., Ornithopus spp., Oryza spp. (e.g. Oryza sativa, Oryza latifolia), Panicum miliaceum, Panicum virgatum, Passiflora edulis, Pastinaca sativa, Pennisetum sp., Persea spp., Petroselinum crispum, Phalaris arundinacea, Phaseolus spp., Phleum pratense, Phoenix spp., Phragmites australis, Physalis spp., Pinus spp., Pistacia vera, Pisum spp., Poa spp., Populus spp., Prosopis spp., Prunus spp., Psidium spp., Punica granatum, Pyrus communis, Quercus spp., Raphanus sativus, Rheum rhabarbarum, Ribes spp., Ricinus communis, Rubus spp., Saccharum spp., Salix sp., Sambucus spp., Secale cereale, Sesamum spp., Sinapis sp., Solanum spp. (e.g. Solanum tuberosum, Solanum integrifolium or Solanum lycopersicum), Sorghum bicolor, Spinacia spp., Syzygium spp., Tagetes spp., Tamarindus indica, Theobroma cacao, Trifolium spp., Tripsacum dactyloides, Triticosecale rimpaui, Triticum spp. (e.g. Triticum aestivum, Triticum durum, Triticum turgidum, Triticum hybernum, Triticum macha, Triticum sativum, Triticum monococcum or Triticum vulgare), Tropaeolum minus, Tropaeolum majus, Vaccinium spp., Vicia spp., Vigna spp., Viola odorata, Vitis spp., Zea mays, Zizania palustris, Ziziphus spp., amaranth, artichoke, asparagus, broccoli, Brussels sprouts, cabbage, canola, carrot, cauliflower, celery, collard greens, flax, kale, lentil, oilseed rape, okra, onion, potato, rice, soybean, strawberry, sugar beet, sugar cane, sunflower, tomato, squash, tea and algae, amongst others. According to a preferred embodiment of the present invention, the plant is a crop plant. Examples of crop plants include inter alia soybean, sunflower, canola, alfalfa, rapeseed, cotton, tomato, potato or tobacco. Further preferably, the plant is a monocotyledonous plant, such as sugarcane. Further preferably, the plant is a cereal, such as rice, maize, wheat, barley, millet, rye, sorghum or oats.

[0140] In a preferred embodiment, the plant has been previously produced by a process comprising recombinantly preparing a plant by introducing and over-expressing a wild-type or mutated PPO transgene according to the present invention, as described in greater detail hereinafter.

[0141] In another preferred embodiment, the plant has been previously produced by a process comprising in situ mutagenizing plant cells, to obtain plant cells which express a mutated PPO.

[0142] As disclosed herein, the nucleic acids of the invention find use in enhancing the herbicide tolerance of plants that comprise in their genomes a gene encoding a herbicide-tolerant wild-type or mutated PPO protein. Such a gene may be an endogenous gene or a transgene, as described hereinafter.

[0143] Therefore, in another embodiment the present invention refers to a method of increasing or enhancing the phenylpyridine herbicide tolerance or resistance of a plant, the method comprising overexpressing a nucleic acid encoding a PPO polypeptide which comprises one or more of the following motifs 1, 2, and/or 3:
[0144] a. Motif 1: SQ[N/K/H]KRYI, wherein the Arg at position 5 within said motif is substituted by any other amino acid;
[0145] b. Motif 2: TLGTLFSS, wherein the Leu at position 2 within said motif is substituted by by any other amino acid;
[0146] c. Motif 3: [F/Y]TTF[V/I]GG, wherein the Phe at position 4 within said motif is substituted by by any other amino acid.

[0147] In another embodiment the present invention refers to a method of increasing or enhancing the phenylpyridine herbicide tolerance or resistance of a plant, the method comprising overexpressing a nucleic acid encoding a herbicide resistant or tolerant PPO polypeptide which comprises a variant of the amino acid sequence of SEQ ID NO: 1, 2, 3, 4, 5, 6, 7, 8, 9, 10, 11, 12, 13, 14, 15, 16, 17, 18, 19, 20, 21, 22, 23, 24, 25, 26, 27, 28, 29, 30, 31, 32, 33, 34, 35, 36, 37, 38, 39, 40, 41, 42, 43, 44, 45, 46, 47, 48, 49, 50, 51, 52, 53, 54, 55, 56, 57, 58, 59, 60, 61, 62, 63, 64, 65, 66, 67, 68, 69, 70, 71, 72, 73, 74, 75, 76, 77, 78, 79, 80, 81, 82, 83, 84, 85, 86, 87, 88, 89, 90, 91, 92, 93, 94, 95, 96, 97, 98, 99, 100, 101, 102, 103, 104, 105, 106, 107, 108, 109, 110, 111, 112, 113, 114, 115, 116, 117, 577, 579, 581, 583, 585, 587, 589, 591, 593, 595, 597, 599, 601, 603, 605, 607, 609, 611, 613, 615, 617, 619, 621, 623, 625, or 627, which variant comprises one or more of the following substitutions:
[0148] a. the amino acid corresponding to Arg128 of SEQ ID NO: 1 is substituted by by any other amino acid.
[0149] b. the amino acid corresponding to Leu397 of SEQ ID NO: 1 is substituted by by any other amino acid.
[0150] c. the amino acid corresponding to Phe420 of SEQ ID NO: 1 is substituted by by any other amino acid.

[0151] In another embodiment the present invention refers to a method of increasing or enhancing the phenylpyridine herbicide tolerance or resistance of a plant, the method comprising overexpressing a nucleic acid encoding a herbicide resistant or tolerant PPO polypeptide which comprises the amino acid sequence of SEQ ID NO: 265, 266, 267, 268, 269, 270, 271, 272, 273, 274, 275, 276, 277, 278, 279, 280, 281, 282, 283, 284, 285, 286, 287, 288, 289, 290, 291, 292, 293, 294, 295, 296, 297, 298, 299, 300, 301, 302, 303, 304, 305, 306, 307, 308, 309, 310, 311, 312, 313, 314, 315, 316, 317, 318, 319, 320, 321, 322, 323, 324, 325, 326, 327328, 329, 330, 331, 332, 333, 334, 335, 336, 337, 338, 339, 340, 341, 342, 343, 344, 345, 346, 347, 348, 349, 350, 351, 352, 353, 354, 355, 356, 357, 358, 359, 360, 361, 362, 363, 364, 365, 366, 367, 368, 369, 370, 371, 372, 373, 374, 375, 376, 377, 378, 379, 380, 381, 382, 383, 384, 385, 386, 387, 388, 389, 390, 391, 392, 393, 394, 395, 396, 397, 398, 399, 400, 401, 402, 403, 404, 405, 406, 407, 408, 409, 410, 411, 412, 413, 414, 415, 416, 417, 418, 419, 420, 421, 422, 423, 424, 425, 426, 427, 428, 429, 430, 431, 432, 433, 434, 435, 436, 437, 438, 439, 440, 441, 442, 443, 444, 445, 446, 447, 448, 449, 450, 451, 452, 453, 454, 455, 456, 457, 458, 459, 460, 461, 462, 463, 464, 465, 466, 467, 468, 469, 470, 471, 472, 473, 474, 475, 476, 477, 478, 479, 480, 481, 482, 483, 484, 485, 486, 487, 488, 489, 490, 491, 492, 493, 494, 495, 496, 497, 498, 499, 500, 501, 502, 503, 504, 505, 506, 507, 508, 509, 510, 511, 512, 513, 514, 515, 516, 517, 518, 519, 520, 521, 522, 523, 524, 525, 526, 527, 528, 529, 530, 531, 532, 533, 534, 535, 536, 537, 538, 539, 540, 541, 542, 543, 544, 545, 546, 547, 548, 549, 550, 551, 552, 553, 554, 555, 556, 557, 558, 559, 560, 561, 562, 563, 564, 565, or a variant thereof.

[0152] In another embodiment the present invention refers to a method of increasing or enhancing the phenylpyridine herbicide tolerance or resistance of a plant, the method comprising overexpressing a nucleic acid encoding a herbicide resistant or tolerant PPO polypeptide which comprises the amino acid sequence of SEQ ID NO: 240, 241, 242, 243, 244, 245, 246, 247, 248, 249, 250, 251, 252, 253, 254, 255, 256, 257, 258, 259, 260, 261, or 262.

[0153] Additionally, in certain embodiments, the nucleic acids of the present invention can be stacked with any combination of polynucleotide sequences of interest in order to create plants with a desired phenotype. For example, the nucleic acids of the present invention may be stacked with any other polynucleotides encoding polypeptides having pesticidal and/or insecticidal activity, such as, for example, the Bacillus thuringiensis toxin proteins (described in U.S. Pat. Nos. 5,366,892; 5,747,450; 5,737,514; 5,723,756; 5,593,881; and Geiser et al (1986) Gene 48: 109), By way of example, polynucleotides that may be stacked with the nucleic acids of the present invention include nucleic acids encoding polypeptides conferring resistance to pests/pathogens such as viruses, nematodes, insects or fungi, and the like. Exemplary polynucleotides that may be stacked with nucleic acids of the invention include polynucleotides encoding: polypeptides having pesticidal and/or insecticidal activity, such as other Bacillus thuringiensis toxic proteins (described in U.S. Pat. Nos. 5,366,892; 5,747,450; 5,737,514; 5,723,756; 5,593,881; and Geiser et al., (1986) Gene 48:109), lectins (Van Damme et al. (1994) Plant Mol. Biol. 24:825, pentin (described in U.S. Pat. No. 5,981,722), and the like; traits desirable for disease or herbicide resistance (e.g., fumonisin detoxification genes (U.S. Pat. No. 5,792,931); avirulence and disease resistance genes (Jones et al. (1994) Science 266:789; Martin et al., (1993) Science 262:1432; Mindrinos et al. (1994) Cell 78:1089); acetolactate synthase (ALS) mutants that lead to herbicide resistance such as the S4 and/or Hra mutations; glyphosate resistance (e.g., 5-enol-pyrovyl-shikimate-3-phosphate-synthase (EPSPS) gene, described in U.S. Pat. Nos. 4,940,935 and 5,188,642; or the glyphosate N-acetyltransferase (GAT) gene, described in Castle et al. (2004) Science, 304:1151-1154; and in U.S. Patent App. Pub. Nos. 20070004912, 20050246798, and 20050060767)); glufosinate resistance (e.g, phosphinothricin acetyl transferase genes PAT and BAR, described in U.S. Pat. Nos. 5,561,236 and 5,276,268); resistance to herbicides including sulfonyl urea, DHT (2,4D), and PPO herbicides (e.g., glyphosate acetyl transferase, aryloxy alkanoate dioxygenase, acetolactate synthase, and protoporphyrinogen oxidase); a cytochrome P450 or variant thereof that confers herbicide resistance or tolerance to, inter alia, HPPD herbicides (U.S. patent application Ser. No. 12/156,247; U.S. Pat. Nos. 6,380,465; 6,121,512; 5,349,127; 6,649,814; and 6,300,544; and PCT Patent App. Pub. No. WO2007000077); and traits desirable for processing or process products such as high oil (e.g., U.S. Pat. No. 6,232,529); modified oils (e.g., fatty acid desaturase genes (U.S. Pat. No. 5,952,544; WO 94/11516)); modified starches (e.g., ADPG pyrophosphorylases (AGPase), starch synthases (SS), starch branching enzymes (SBE), and starch debranching enzymes (SDBE)); and polymers or bioplastics (e.g., U.S. Pat. No. 5,602,321; beta-ketothiolase, polyhydroxybutyrate synthase, and acetoacetyl-CoA reductase (Schubert et al. (1988) J. Bacteriol. 170:5837-5847) facilitate expression of polyhydroxyalkanoates (PHAs)); the disclosures of which are herein incorporated by reference.

[0154] In a preferred embodiment, the plant comprises at least one additional heterologous nucleic acid comprising a nucleotide sequence encoding a herbicide tolerance enzyme selected, for example, from the group consisting of 5-enolpyruvylshikimate-3-phosphate synthase (EPSPS), Glyphosate acetyl transferase (GAT), cytochrome P450 monooxygenase, phosphinothricin acetyltransferase (PAT), Acetohydroxyacid synthase (AHAS; EC 4.1.3.18, also known as acetolactate synthase or ALS), hydroxyphenyl pyruvate dioxygenase (HPPD), Phytoene desaturase (PD) and dicamba degrading enzymes as disclosed in WO 02/068607, or phenoxyaceticacid- and phenoxypropionicacid-derivative degrading enzymes as disclosed in WO 2008141154 or WO 2005107437. The combinations generated can also include multiple copies of any one of the polynucleotides of interest.

[0155] Generally, the term “herbicide” is used herein to mean an active ingredient that kills, controls or otherwise adversely modifies the growth of plants. The preferred amount or concentration of the herbicide is an “effective amount” or “effective concentration.” By “effective amount” and “effective concentration” is intended an amount and concentration, respectively, that is sufficient to kill or inhibit the growth of a similar, wild-type, plant, plant tissue, plant cell, or host cell, but that said amount does not kill or inhibit as severely the growth of the herbicide-resistant plants, plant tissues, plant cells, and host cells of the present invention. Typically, the effective amount of a herbicide is an amount that is routinely used in agricultural production systems to kill weeds of interest. Such an amount is known to those of ordinary skill in the art. Herbicidal activity is exhibited by herbicides useful for the the present invention when they are applied directly to the plant or to the locus of the plant at any stage of growth or before planting or emergence. The effect observed depends upon the plant species to be controlled, the stage of growth of the plant, the application parameters of dilution and spray drop size, the particle size of solid components, the environmental conditions at the time of use, the specific compound employed, the specific adjuvants and carriers employed, the soil type, and the like, as well as the amount of chemical applied. These and other factors can be adjusted as is known in the art to promote non-selective or selective herbicidal action. Generally, it is preferred to apply the herbicide postemergence to relatively immature undesirable vegetation to achieve the maximum control of weeds.

[0156] By a “herbicide-tolerant” or “herbicide-resistant” plant, it is intended that a plant that is tolerant or resistant to at least one herbicide at a level that would normally kill, or inhibit the growth of, a normal or wild-type plant. By “herbicide-tolerant wildtype or mutated PPO protein” or “herbicide-resistant wildtype or mutated PPO protein”, it is intended that such a PPO protein displays higher PPO activity, relative to the PPO activity of a wild-type PPO protein, when in the presence of at least one herbicide that is known to interfere with PPO activity and at a concentration or level of the herbicide that is known to inhibit the PPO activity of the wild-type mutated PPO protein. Furthermore, the PPO activity of such a herbicide-tolerant or herbicide-resistant mutated PPO protein may be referred to herein as “herbicide-tolerant” or “herbicide-resistant” PPO activity.

[0157] In a particularly preferred embodiment, the herbicides useful for the present invention refer phenylpyridines of formula (I)

[chemical structure]

[0158] wherein the variables have the following meanings:
[0159] R¹ halogen, C₁-C₄-haloalkyl or SO₂CH₃;
[0160] R² H, CH₃ or NH₂;
[0161] R³ halogen;
[0162] R⁴ H or halogen;
[0163] R⁵ halogen or CN;
[0164] R⁶ H or CH₃;
[0165] R⁷ C₁-C₆-alkoxy, C₁-C₆-haloalkoxy, C₃-C₆-alkenyloxy, C₃-C₆-alkynyloxy, C₁-C₆-alkylthio, C₁-C₆-haloalkylthio, C₃-C₆-alkenylthio or C₃-C₆-alkynylthio;
   [0166] preferably C₁-C₆-alkoxy, C₁-C₆-haloalkoxy, C₃-C₆-alkenyloxy, C₃-C₆-alkynyloxy;
[0167] R⁸ OR⁹, SR⁹, NR¹⁰R¹¹, NR⁹S(O)R¹⁰, NR⁹S(O)₂R¹⁰, NR⁹S(O)NR¹⁰R¹¹, or NR⁹S(O)₂NR¹⁰R¹¹,
   [0168] wherein
   [0169] R⁹ is hydrogen, C₁-C₆-alkyl, C₃-C₆-alkenyl, C₃-C₆-alkynyl, C₁-C₆-haloalkyl, C₃-C₆-haloalkenyl, C₃-C₆-haloalkynyl, C₁-C₆-cyanoalkyl, C₁-C₆-alkoxy-C₁-C₆-alkyl, C₁-C₆-alkoxy-C₁-C₆-alkoxy-C₁-C₆-alkyl, di(C₁-C₆-alkoxy)C₁-C₆-alkyl, C₁-C₆-halo-alkoxy-C₁-C₆-alkyl, C₃-C₆-alkenyloxy-C₁-C₆-alkyl, C₃-C₆-haloalkenyloxy-C₁-C₆-alkyl, C₃-C₆-alkenyloxy-C₁-C₆-alkoxy-C₁-C₆-alkyl, C₁-C₆-alkylthio-C₁-C₆-alkyl, C₁-C₆-alkylsulfinyl-C₁-C₆-alkyl, C₁-C₆-alkylsulfonyl-C₁-C₆-alkyl, C₁-C₆-alkylcarbonyl-C₁-C₆-alkyl, C₁-C₆-alkoxycarbonyl-C₁-C₆-alkyl, C₁-C₆-haloalkoxycarbonyl-C₁-C₆-alkyl, C₃-C₆-alkenyloxycarbonyl-C₁-C₆-alkyl, amino, (C₁-C₆-alkyl)amino, di(C₁-C₆-alkyl)amino, (C₁-C₆-alkylcarbonyl)amino, amino-C₁-C₆-alkyl, (C₁-C₆-alkyl)amino-C₁-C₆-alkyl, di(C₁-C₆-alkyl)amino-C₁-C₆-alkyl, aminocarbonyl-C₁-C₆-alkyl, (C₁-C₆-alkyl)aminocarbonyl-C₁-C₆-alkyl, di(C₁-C₆-alkyl)aminocarbonyl-C₁-C₆-alkyl, —N═CR¹²R¹³, wherein R¹² and R¹³ independently of one another are H, C₁-C₄-alkyl or phenyl;
      [0170] C₃-C₆-cycloalkyl, C₃-C₆-cycloalkyl-C₁-C₆-alkyl, C₃-C₆-heterocyclyl, C₃-C₆-heterocyclyl-C₁-C₆-alkyl, phenyl, phenyl-C₁-C₄-alkyl or a 5- or 6 membered heteroaryl,
         [0171] wherein each cycloalkyl, heterocyclyl, phenyl or heteroaryl ring can be substituted by one to four substituents selected from R¹⁴ or a 3- to 7-membered carbocyclus,
            [0172] which carbocyclus optionally has in addition to carbon atoms one or two ring members selected from the group consisting of —N(R¹²)—, —N═N—, —C(═O)—, —O— and —S—, and
            [0173] which carbocyclus is optionally substituted with one to four substituents selected from R¹⁴;
            wherein R¹⁴ is halogen, NO₂, ON, C₁-C₄-alkyl, C₁-C₄-haloalkyl, C₁-C₄-alkoxy or C₁-C₄-alkoxycarbonyl;
[0174] R¹⁰, R¹¹ independently of one another are R⁹, or together form a 3- to 7-membered carbocyclus,
   [0175] which carbocyclus optionally has in addition to carbon atoms one or two ring members selected from the group consisting of —N(R¹²)—, —N═N—, —C(═O)—, —O— and —S—, and
   [0176] which carbocyclus is optionally substituted with one to four substituents selected from R¹⁴;
[0177] X O or S; and
[0178] Y O or S;
[0179] including their agriculturally acceptable salts.

[0180] If the phenylpyridines of formula (I), the herbicidal compounds B and/or the safeners C as described herein are capable of forming geometrical isomers, for example E/Z isomers, it is possible to use both, the pure isomers and mixtures thereof, in the compositions according to the invention.

[0181] If the phenylpyridines of formula (I), the herbicidal compounds B and/or the safeners C as described herein have one or more centres of chirality and, as a consequence, are present as enantiomers or diastereomers, it is possible to use both, the pure enantiomers and diastereomers and their mixtures, in the compositions according to the invention.

[0182] If the phenylpyridines of formula (I), the herbicidal compounds B and/or the safeners C as described herein have ionizable functional groups, they can also be employed in the form of their agriculturally acceptable salts. Suitable are, in general, the salts of those cations and the acid addition salts of those acids whose cations and anions, respectively, have no adverse effect on the activity of the active compounds.

[0183] Preferred cations are the ions of the alkali metals, preferably of lithium, sodium and potassium, of the alkaline earth metals, preferably of calcium and magnesium, and of the transition metals, preferably of manganese, copper, zinc and iron, further ammonium and substituted ammonium in which one to four hydrogen atoms are replaced by C₁-C₄-alkyl, hydroxy-C₁-C₄-alkyl, C₁-C₄-alkoxy-C₁-C₄-alkyl, hydroxy-C₁-C₄-alkoxy-C₁-C₄-alkyl, phenyl or benzyl, preferably ammonium, methylammonium, isopropylammonium, dimethylammonium, diisopropylammonium, trimethylammonium, heptylammonium, dodecylammonium, tetradecylammonium, tetramethylammonium, tetraethylammonium, tetrabutylammonium, 2-hydroxyethylammonium (olamine salt), 2-(2-hydroxyeth-1-oxy)eth-1-ylammonium (diglycolamine salt), di(2-hydroxyeth-1-yl)ammonium (diolamine salt), tris(2-hydroxyethyl)ammonium (trolamine salt), tris(2-hydroxypropyl)ammonium, benzyltrimethylammonium, benzyltriethylammonium, N,N,N-trimethylethanolammonium (choline salt), furthermore phosphonium ions, sulfonium ions, preferably tri(C₁-C₄-alkyl)sulfonium, such as trimethylsulfonium, and sulfoxonium ions, preferably tri(C₁-C₄-alkyl)sulfoxonium, and finally the salts of polybasic amines such as N,N-bis-(3-aminopropyl)methylamine and diethylenetriamine.

[0184] Anions of useful acid addition salts are primarily chloride, bromide, fluoride, iodide, hydrogensulfate, methylsulfate, sulfate, dihydrogenphosphate, hydrogenphosphate, nitrate, bicarbonate, carbonate, hexafluorosilicate, hexafluorophosphate, benzoate and also the anions of C₁-C₄-alkanoic acids, preferably formate, acetate, propionate and butyrate.

[0185] Herbicidal compounds B and/or safeners C as described herein having a carboxyl group can be employed in the form of the acid, in the form of an agriculturally suitable salt as mentioned above or else in the form of an agriculturally acceptable derivative, for example as amides, such as mono- and di-C₁-C₆-alkylamides or arylamides, as esters, for example as allyl esters, propargyl esters, C₁-C₁₀-alkyl esters, alkoxyalkyl esters, tefuryl ((tetrahydrofuran-2-yl)methyl) esters and also as thioesters, for example as C₁-C₁₀-alkylthio esters. Preferred mono- and di-C₁-C₆-alkylamides are the methyl and the dimethylamides. Preferred arylamides are, for example, the anilides and the 2-chloroanilides. Preferred alkyl esters are, for example, the methyl, ethyl, propyl, isopropyl, butyl, isobutyl, pentyl, mexyl (1-methylhexyl), meptyl (1-methylheptyl), heptyl, octyl or isooctyl (2-ethylhexyl) esters. Preferred C₁-C₄-alkoxy-C₁-C₄-alkyl esters are the straight-chain or branched C₁-C₄-alkoxy ethyl esters, for example the 2-methoxyethyl, 2-ethoxyethyl, 2-butoxyethyl (butotyl), 2-butoxypropyl or 3-butoxypropyl ester. An example of a straight-chain or branched C₁-C₁₀-alkylthio ester is the ethylthio ester.

[0186] The organic moieties mentioned in the definition of the variables R¹ to R¹⁴, are—like the term halogen—collective terms for individual enumerations of the individual group members. The term halogen denotes in each case fluorine, chlorine, bromine or iodine. All hydrocarbon chains, e.g. all alkyl, alkenyl, alkynyl, alkoxy chains, can be straight-chain or branched, the prefix Cₙ-Cₘ denoting in each case the possible number of carbon atoms in the group.

[0187] Examples of such meanings are:
[0188] C₁-C₄-alkyl and also the C₁-C₄-alkyl moieties of phenyl-C₁-C₄-alkyl: for example CH₃, C₂H₅, n-propyl, CH(CH₃)₂, n-butyl, CH(CH₃)—C₂H₅, CH₂—CH(CH₃)₂ and C(CH₃)₃; C₁-C₆-alkyl and also the C₁-C₆-alkyl moieties of C₁-C₆-alkyoxy-C₁-C₆-alkyl, C₁-C₆-alkoxy-C₁-C₆-alkoxy-C₁-C₆-alkyl, di(C₁-C₆-alkoxy)C₁-C₆-alkyl, C₁-C₆-haloalkoxy-C₁-C₆-alkyl, C₃-C₆-alkenyloxy-C₁-C₆-alkyl, C₃-C₆-haloalkenyloxy-C₁-C₆-alkyl, C₃-C₆-alkenyloxy-C₁-C₆-alkoxy-C₁-C₆-alkyl, C₁-C₆-alkylthio-C₁-C₆-alkyl, C₁-C₆-alkylsulfinyl-C₁-C₆-alkyl, C₁-C₆-alkylsulfonyl-C₁-C₆-alkyl, C₁-C₆-alkylcarbonyl-C₁-C₆-alkyl, C₁-C₆-alkoxycarbonyl-C₁-C₆-alkyl, C₁-C₆-haloalkoxycarbonyl-C₁-C₆-alkyl, C₃-C₆-alkenyloxycarbonyl-C₁-C₆-alkyl, (C₁-C₆-alkylcarbonyl)amino, amino-C₁-C₆-alkyl, (C₁-C₆-alkyl)amino-C₁-C₆-alkyl, di(C₁-C₆-alkyl)amino-C₁-C₆-alkyl, aminocarbonyl-C₁-C₆-alkyl, (C₁-C₆-alkyl)aminocarbonyl-C₁-C₆-alkyl, di(C₁-C₆-alkyl)aminocarbonyl-C₁-C₆-alkyl, C₃-C₆-cycloalkyl-C₁-C₆-alkyl: C₁-C₄-alkyl as mentioned above, and also, for example, n-pentyl, 1-methylbutyl, 2-methylbutyl, 3-methylbutyl, 2,2-dimethylpropyl, 1-ethylpropyl, n-hexyl, 1,1-dimethylpropyl, 1,2-dimethylpropyl, 1-methylpentyl, 2-methylpentyl, 3-methylpentyl, 4-methylpentyl, 1,1-dimethylbutyl, 1,2-dimethylbutyl, 1,3-dimethylbutyl, 2,2-dimethylbutyl, 2,3-dimethylbutyl, 3,3-dimethylbutyl, 1-ethylbutyl, 2-ethylbutyl, 1,1,2-trimethylpropyl, 1,2,2-trimethylpropyl, 1-ethyl-1-methylpropyl or 1-ethyl-2-methylpropyl, preferably methyl, ethyl, n-propyl, 1-methylethyl, n-butyl, 1,1-dimethylethyl, n-pentyl or n-hexyl;
[0189] C₁-C₄-haloalkyl: C₁-C₄-alkyl as mentioned above which is partially or fully substituted by fluorine, chlorine, bromine and/or iodine, for example, chloromethyl, dichloromethyl, trichloromethyl, fluoromethyl, difluoromethyl, trifluoromethyl, chlorofluoromethyl, dichlorofluoromethyl, chlorodifluoromethyl, bromomethyl, iodomethyl, 2-fluoroethyl, 2-chloroethyl, 2-bromoethyl, 2-iodoethyl, 2,2-difluoroethyl, 2,2,2-trifluoroethyl, 2-chloro-2-fluoroethyl, 2-chloro-2,2-difluoroethyl, 2,2-dichloro-2-fluoroethyl, 2,2,2-trichloroethyl, pentafluoroethyl, 2-fluoropropyl, 3-fluoropropyl, 2,2-difluoropropyl, 2,3-difluoropropyl, 2-chloropropyl, 3-chloropropyl, 2,3-dichloropropyl, 2-bromopropyl, 3-bromopropyl, 3,3,3-trifluoropropyl, 3,3,3-trichloropropyl, 2,2,3,3,3-pentafluoropropyl, heptafluoropropyl, 1-(fluoromethyl)-2-fluoroethyl, 1-(chloromethyl)-2-chloroethyl, 1-(bromomethyl)-2-bromoethyl, 4-fluorobutyl, 4-chlorobutyl, 4-bromobutyl, nonafluorobutyl, 1,1,2,2,-tetrafluoroethyl and 1-trifluoromethyl-1,2,2,2-tetrafluoroethyl;
[0190] C₁-C₆-haloalkyl and also the C₁-C₆-haloalkyl moieties of C₁-C₆-haloalkylthio: C₁-C₄-haloalkyl as mentioned above, and also, for example, 5-fluoropentyl, 5-chloropentyl, 5-bromopentyl, 5-iodopentyl, undecafluoropentyl, 6-fluorohexyl, 6-chlorohexyl, 6-bromohexyl, 6-iodohexyl and dodecafluorohexyl;
[0191] C₃-C₆-alkenyl and also the C₃-C₆-alkenyl moieties of C₃-C₆-alkenyloxy, C₃-C₆-alkenylthio, C₃-C₆-alkenyloxy-C₁-C₆-alkyl, C₃-C₆-alkenyloxy-C₁-C₆-alkoxy-C₁-C₆-alkyl, C₃-C₆-alkenyloxycarbonyl-C₁-C₆-alkyl: for example 1-propenyl, 2-propenyl, 1-methylethenyl, 1-butenyl, 2-butenyl, 3-butenyl, 1-methyl-1-propenyl, 2-methyl-1-propenyl, 1-methyl-2-propenyl, 2-methyl-2-propenyl, 1-pentenyl, 2-pentenyl, 3-pentenyl, 4-pentenyl, 1-methyl-1-butenyl, 2-methyl-1-butenyl, 3-methyl-1-butenyl, 1-methyl-2-butenyl, 2-methyl-2-butenyl, 3-methyl-2-butenyl, 1-methyl-3-butenyl, 2-methyl-3-butenyl, 3-methyl-3-butenyl, 1,1-dimethyl-2-propenyl, 1,2-dimethyl-1-propenyl, 1,2-dimethyl-2-propenyl, 1-ethyl-1-propenyl, 1-ethyl-2-propenyl, 1-hexenyl, 2-hexenyl, 3-hexenyl, 4-hexenyl, 5-hexenyl, 1-methyl-1-pentenyl, 2-methyl-1-pentenyl, 3-methyl-1-pentenyl, 4-methyl-1-pentenyl, 1-methyl-2-pentenyl, 2-methyl-2-pentenyl, 3-methyl-2-pentenyl, 4-methyl-2-pentenyl, 1-methyl-3-pentenyl, 2-methyl-3-pentenyl, 3-methyl-3-pentenyl, 4-methyl-3-pentenyl, 1-methyl-4-pentenyl, 2-methyl-4-pentenyl, 3-methyl-4-pentenyl, 4-methyl-4-pentenyl, 1,1-dimethyl-2-butenyl, 1,1-dimethyl-3-butenyl, 1,2-dimethyl-1-butenyl, 1,2-dimethyl-2-butenyl, 1,2-dimethyl-3-butenyl, 1,3-dimethyl-1-butenyl, 1,3-dimethyl-2-butenyl, 1,3-dimethyl-3-butenyl, 2,2-dimethyl-3-butenyl, 2,3-dimethyl-1-butenyl, 2,3-dimethyl-2-butenyl, 2,3-dimethyl-3-butenyl, 3,3-dimethyl-1-butenyl, 3,3-dimethyl-2-butenyl, 1-ethyl-1-butenyl, 1-ethyl-2-butenyl, 1-ethyl-3-butenyl, 2-ethyl-1-butenyl, 2-ethyl-2-butenyl, 2-ethyl-3-butenyl, 1,1,2-trimethyl-2-propenyl, 1-ethyl-1-methyl-2-propenyl, 1-ethyl-2-methyl-1-propenyl and 1-ethyl-2-methyl-2-propenyl;
[0192] C₃-C₆-haloalkenyl and also the C₃-C₆-haloalkenyl moieties of C₃-C₆-haloalkenyloxy-C₁-C₆-alkyl: a C₃-C₆-alkenyl radical as mentioned above which is partially or fully substituted by fluorine, chlorine, bromine and/or iodine, for example 2-chloroprop-2-en-1-yl, 3-chloroprop-2-en-1-yl, 2,3-dichloroprop-2-en-1-yl, 3,3-dichloroprop-2-en-1-yl, 2,3,3-trichloro-2-en-1-yl, 2,3-dichlorobut-2-en-1-yl, 2-bromoprop-2-en-1-yl, 3-bromoprop-2-en-1-yl, 2,3-dibromoprop-2-en-1-yl, 3,3-dibromoprop-2-en-1-yl, 2,3,3-tribromo-2-en-1-yl or 2,3-dibromobut-2-en-1-yl;
[0193] C₃-C₆-alkynyl and also the C₃-C₆-alkynyl moieties of C₃-C₆-alkynyloxy, C₃-C₆-alkynylthio: for example 1-propynyl, 2-propynyl, 1-butynyl, 2-butynyl, 3-butynyl, 1-methyl-2-propynyl, 1-pentynyl, 2-pentynyl, 3-pentynyl, 4-pentynyl, 1-methyl-2-butynyl, 1-methyl-3-butynyl, 2-methyl-3-butynyl, 3-methyl-1-butynyl, 1,1-dimethyl-2-propynyl, 1-ethyl-2-propynyl, 1-hexynyl, 2-hexynyl, 3-hexynyl, 4-hexynyl, 5-hexynyl, 1-methyl-2-pentynyl, 1-methyl-3-pentynyl, 1-methyl-4-pentynyl, 2-methyl-3-pentynyl, 2-methyl-4-pentynyl, 3-methyl-1-pentynyl, 3-methyl-4-pentynyl, 4-methyl-1-pentynyl, 4-methyl-2-pentynyl, 1,1-dimethyl-2-butynyl, 1,1-dimethyl-3-butynyl, 1,2-dimethyl-3-butynyl, 2,2-dimethyl-3-butynyl, 3,3-dimethyl-1-butynyl, 1-ethyl-2-butynyl, 1-ethyl-3-butynyl, 2-ethyl-3-butynyl and 1-ethyl-1-methyl-2-propynyl;
[0194] C₃-C₆-haloalkynyl: a C₃-C₆-alkynyl radical as mentioned above which is partially or fully substituted by fluorine, chlorine, bromine and/or iodine, for example 1,1-difluoroprop-2-yn-1-yl, 3-chloroprop-2-yn-1-yl, 3-bromoprop-2-yn-1-yl, 3-iodoprop-2-yn-1-yl, 4-fluorobut-2-yn-1-yl, 4-chlorobut-2-yn-1-yl, 1,1-difluorobut-2-yn-1-yl, 4-iodobut-3-yn-1-yl, 5-fluoropent-3-yn-1-yl, 5-iodopent-4-yn-1-yl, 6-fluorohex-4-yn-1-yl or 6-iodohex-5-yn-1-yl;
[0195] C₁-C₄-alkoxy and also the C₁-C₄-alkoxy moieties of C₁-C₆-alkoxycarbonyl: for example methoxy, ethoxy, propoxy, 1-methylethoxy butoxy, 1-methylpropoxy, 2-methylpropoxy and 1,1-dimethylethoxy;
[0196] C₁-C₆-alkoxy and also the C₁-C₆-alkoxy moieties of C₁-C₆-alkyoxy-C₁-C₆-alkyl, C₁-C₆-alkoxy-C₁-C₆-alkoxy-C₁-C₆-alkyl, di(C₁-C₆-alkoxy)C₁-C₆-alkyl, C₃-C₆-alkenyloxy-C₁-C₆-alkoxy-C₁-C₆-alkyl, C₁-C₆-alkoxycarbonyl-C₁-C₆-alkyl: C₁-C₄-alkoxy as mentioned above, and also, for example, pentoxy, 1-methylbutoxy, 2-methylbutoxy, 3-methoxylbutoxy, 1,1-dimethylpropoxy, 1,2-dimethylpropoxy, 2,2-dimethylpropoxy, 1-ethylpropoxy, hexoxy, 1-methylpentoxy, 2-methylpentoxy, 3-methylpentoxy, 4-methylpentoxy, 1,1-dimethylbutoxy, 1,2-dimethylbutoxy, 1,3-dimethylbutoxy, 2,2-dimethylbutoxy, 2,3-dimethylbutoxy, 3,3-dimethylbutoxy, 1-ethylbutoxy, 2-ethylbutoxy, 1,1,2-trimethylpropoxy, 1,2,2-trimethylpropoxy, 1-ethyl-1-methylpropoxy and 1-ethyl-2-methylpropoxy.
[0197] C₁-C₄-haloalkoxy: a C₁-C₄-alkoxy radical as mentioned above which is partially or fully substituted by fluorine, chlorine, bromine and/or iodine, i.e., for example, fluoromethoxy, difluoromethoxy, trifluoromethoxy, chlorodifluoromethoxy, bromodifluoromethoxy, 2-fluoroethoxy, 2-chloroethoxy, 2-bromomethoxy, 2-iodoethoxy, 2,2-difluoroethoxy, 2,2,2-trifluoroethoxy, 2-chloro-2-fluoroethoxy, 2-chloro-2,2-difluoroethoxy, 2,2-dichloro-2-fluoroethoxy, 2,2,2-trichloroethoxy, pentafluoroethoxy, 2-fluoropropoxy, 3-fluoropropoxy, 2-chloropropoxy, 3-chloropropoxy, 2-bromopropoxy, 3-bromopropoxy, 2,2-difluoropropoxy, 2,3-difluoropropoxy, 2,3-dichloropropoxy, 3,3,3-trifluoropropoxy, 3,3,3-trichloropropoxy, 2,2,3,3,3-pentafluoropropoxy, heptafluoropropoxy, 1-(fluoromethyl)-2-fluoroethoxy, 1-(chloromethyl)-2-chloroethoxy, 1-(bromomethyl)-2-bromoethoxy, 4-fluorobutoxy, 4-chlorobutoxy, 4-bromobutoxy and nonafluorobutoxy;
[0198] C₁-C₆-haloalkoxy and also the C₁-C₆-haloalkoxy moieties of C₁-C₆-haloalkoxy-C₁-C₆-alkyl, C₁-C₆-haloalkoxycarbonyl-C₁-C₆-alkyl:a C₁-C₄-haloalkoxy as mentioned above, and also, for example, 5-fluoropentoxy, 5-chloropentoxy, 5-bromopentoxy, 5-iodopentoxy, undecafluoropentoxy, 6-fluorohexoxy, 6-chlorohexoxy, 6-bromohexoxy, 6-iodohexoxy and dodecafluorohexoxy;
[0199] C₁-C₄-alkylthio: for example methylthio, ethylthio, propylthio, 1-methylethylthio, butylthio, 1-methylpropylthio, 2-methylpropylthio and 1,1-dimethylethylthio;
[0200] C₁-C₆-alkylthio and also the C₁-C₆-alkylthio moieties of C₁-C₆-alkylthio-C₁-C₆-alkyl: C₁-C₄-alkylthio as mentioned above, and also, for example, pentylthio, 1-methylbutylthio, 2-methylbutylthio, 3-methylbutylthio, 2,2-dimethylpropylthio, 1-ethylpropylthio, hexylthio, 1,1-dimethylpropylthio, 1,2-dimethylpropylthio, 1-methylpentylthio, 2-methylpentylthio, 3-methylpentylthio, 4-methylpentylthio, 1,1-dimethylbutylthio, 1,2-dimethylbutylthio, 1,3-dimethylbutylthio, 2,2-dimethylbutylthio, 2,3-dimethylbutylthio, 3,3-dimethylbutylthio, 1-ethylbutylthio, 2-ethylbutylthio, 1,1,2-trimethylpropylthio, 1,2,2-trimethylpropylthio, 1-ethyl-1-methylpropylthio and 1-ethyl-2-methylpropylthio;
[0201] C₁-C₆-alkylsulfinyl (C₁-C₆-Alkyl-S(═O)—) and also the C₁-C₆-alkylsulfinyl moieties of C₁-C₆-alkylsulfinyl-C₁-C₆-alkyl, for example methylsulfinyl, ethylsulfinyl, propylsulfinyl, 1-methylethylsulfinyl, butylsulfinyl, 1-methylpropylsulfinyl, 2-methylpropylsulfinyl, 1,1-di-methylethylsulfinyl, pentylsulfinyl, 1-methylbutylsulfinyl, 2-methylbutylsulfinyl, 3-methylbutylsulfinyl, 2,2-dimethylpropylsulfinyl, 1-ethylpropylsulfinyl, 1,1-dimethylpropylsulfinyl, 1,2-dimethylpropylsulfinyl, hexylsulfinyl, 1-methylpentylsulfinyl, 2-methylpentylsulfinyl, 3-methylpentylsulfinyl, 4-methylpentyl-sulfinyl, 1,1-dimethylbutylsulfinyl, 1,2-dimethylbutylsulfinyl, 1,3-dimethylbutyl-sulfinyl, 2,2-dimethylbutylsulfinyl, 2,3-dimethylbutylsulfinyl, 3,3-dimethylbutyl-sulfinyl, 1-ethylbutylsulfinyl, 2-ethylbutylsulfinyl, 1,1,2-trimethylpropylsulfinyl, 1,2,2-trimethylpropylsulfinyl, 1-ethyl-1-methylpropylsulfinyl and 1-ethyl-2-methylpropylsulfinyl;
[0202] C₁-C₆-alkylsulfonyl (C₁-C₆-alkyl-S(O)₂—) and also the C₁-C₆-alkylsulfonyl moieties of C₁-C₆-alkylsulfonyl-C₁-C₆-alkyl, for example methylsulfonyl, ethylsulfonyl, propylsulfonyl, 1-methylethylsulfonyl, butylsulfonyl, 1-methylpropylsulfonyl, 2-methyl-propylsulfonyl, 1,1-dimethylethylsulfonyl, pentylsulfonyl, 1-methylbutylsulfonyl, 2-methylbutylsulfonyl, 3-methylbutylsulfonyl, 1,1-dimethylpropylsulfonyl, 1,2-dimethylpropylsulfonyl, 2,2-dimethylpropylsulfonyl, 1-ethylpropylsulfonyl, hexylsulfonyl, 1-methylpentylsulfonyl, 2-methylpentylsulfonyl, 3-methylpentylsulfonyl, 4-methylpentylsulfonyl, 1,1-dimethylbutylsulfonyl, 1,2-dimethylbutylsulfonyl, 1,3-dimethylbutylsulfonyl, 2,2-dimethylbutylsulfonyl, 2,3-dimethylbutylsulfonyl, 3,3-dimethylbutylsulfonyl, 1-ethylbutylsulfonyl, 2-ethylbutylsulfonyl, 1,1,2-trimethyl-propylsulfonyl, 1,2,2-trimethylpropylsulfonyl, 1-ethyl-1-methylpropylsulfonyl and 1-ethyl-2-methylpropylsulfonyl;
[0203] (C₁-C₄-alkyl)amino: for example methylamino, ethylamino, propylamino, 1-methylethyl-amino, butylamino, 1-methylpropylamino, 2-methylpropylamino or 1,1-dimethylethylamino;
[0204] (C₁-C₆-alkyl)amino and also the (C₁-C₆-alkyl)amino moieties of (C₁-C₆-alkyl)amino-C₁-C₆-alkyl, (C₁-C₆-alkyl)aminocarbonyl-C₁-C₆-alkyl: (C₁-C₄-alkylamino) as mentioned above, and also, for example, pentylamino, 1-methylbutylamino, 2-methylbutylamino, 3-methylbutylamino, 2,2-dimethylpropylamino, 1-ethylpropylamino, hexylamino, 1,1-dimethylpropylamino, 1,2-dimethylpropylamino, 1-methylpentylamino, 2-methylpentylamino, 3-methylpentylamino, 4-methylpentylamino, 1,1-dimethylbutylamino, 1,2-dimethylbutylamino, 1,3-dimethylbutylamino, 2,2-dimethylbutylamino, 2,3-dimethylbutyl-amino 3,3-dimethylbutylamino, 1-ethylbutylamino, 2-ethylbutylamino, 1,1,2-trimethyl-propylamino, 1,2,2-trimethyl-propylamino, 1-ethyl-1-methylpropylamino or 1-ethyl-2-methylpropylamino;
[0205] di(C₁-C₆-alkyl)amino and also the di(C₁-C₆-alkyl)amino moieties of di(C₁-C₆-alkyl)amino-C₁-C₆-alkyl, di(C₁-C₆-alkyl)aminocarbonyl-C₁-C₆-alkyl: di(C₁-C₄-alkyl)amino as mentioned above, and also, for example, N-methyl-N-pentylamino, N-methyl-N-(1-methylbutyl)amino, N-methyl-N-(2-methylbutyl)amino, N-methyl-N-(3-methylbutyl)amino, N-methyl-N-(2,2-dimethylpropyl)amino, N-methyl-N-(1-ethylpropyl)amino, N-methyl-N-hexylamino, N-methyl-N-(1,1-dimethylpropyl)amino, N-methyl-N-(1,2-dimethylpropyl)amino, N-methyl-N-(1-methylpentyl)amino, N-methyl-N-(2-methylpentyl)amino, N-methyl-N-(3-methylpentyl)amino, N-methyl-N-(4-methylpentyl)amino, N-methyl-N-(1,1-dimethylbutyl)amino, N-methyl-N-(1,2-dimethylbutyl)amino, N-methyl-N-(1,3-dimethylbutyl)amino, N-methyl-N-(2,2-dimethylbutyl)amino, N-methyl-N-(2,3-dimethylbutyl)amino, N-methyl-N-(3,3-dimethylbutyl)amino, N-methyl-N-(1-ethylbutyl)amino, N-methyl-N-(2-ethylbutyl)amino, N-methyl-N-(1,1,2-trimethylpropyl)amino, N-methyl-N-(1,2,2-trimethylpropyl)amino, N-methyl-N-(1-ethyl-1-methylpropyl)amino, N-methyl-N-(1-ethyl-2-methylpropyl)amino, N-ethyl-N-pentylamino, N-ethyl-N-(1-methylbutyl)amino, N-ethyl-N-(2-methylbutyl)amino, N-ethyl-N-(3-methylbutyl)amino, N-ethyl-N-(2,2-dimethylpropyl)amino, N-ethyl-N-(1-ethylpropyl)amino, N-ethyl-N-hexylamino, N-ethyl-N-(1,1-dimethylpropyl)amino, N-ethyl-N-(1,2-dimethylpropyl)amino, N-ethyl-N-(1-methylpentyl)amino, N-ethyl-N-(2-methylpentyl)amino, N-ethyl-N-(3-methylpentyl)amino, N-ethyl-N-(4-methylpentyl)amino, N-ethyl-N-(1,1-dimethylbutyl)amino, N-ethyl-N-(1,2-dimethylbutyl)amino, N-ethyl-N-(1,3-dimethylbutyl)amino, N-ethyl-N-(2,2-dimethyl-butyl)amino, N-ethyl-N-(2,3-dimethylbutyl)amino, N-ethyl-N-(3,3-dimethylbutyl)amino, N-ethyl-N-(1-ethylbutyl)amino, N-ethyl-N-(2-ethylbutyl)amino, N-ethyl-N-(1,1,2-trimethylpropyl)amino, N-ethyl-N-(1,2,2-trimethylpropyl)amino, N-ethyl-N-(1-ethyl-1-methylpropyl)amino, N-ethyl-N-(1-ethyl-2-methylpropyl)amino, N-propyl-N-pentylamino, N-butyl-N-pentylamino, N,N-dipentylamino, N-propyl-N-hexylamino, N-butyl-N-hexylamino, N-pentyl-N-hexylamino or N,N-dihexylamino;
[0206] C₃-C₆-cycloalkyl and also the cycloalkyl moieties of C₃-C₆-cycloalkyl-C₁-C₆-alkyl: monocyclic saturated hydrocarbons having 3 to 6 ring members, such as cyclopropyl, cyclobutyl, cyclopentyl and cyclohexyl;
[0207] C₃-C₆-heterocyclyl: aliphatic heterocycle having 3 to 6 ring members which, in addition to carbon atoms, contains 1 to 4 nitrogen atoms, or 1 to 3 nitrogen atoms and an oxygen or sulphur atom, or an oxygen or a sulphur atom, for example three- or four-membered heterocycles like 2-oxetanyl, 3-oxetanyl, 2-thietanyl, 3-thietanyl, 1-azetidinyl, 2-azetidinyl, 1-azetinyl, 2-azetinyl; five-membered saturated heterocycles like 2-tetrahydrofuranyl, 3-tetrahydrofuranyl, 2-tetrahydrothienyl, 3-tetrahydrothienyl, 1-pyrrolidinyl, 2-pyrrolidinyl, 3-pyrrolidinyl, 3-isoxazolidinyl, 4-isoxazolidinyl, 5-isoxazolidinyl, 2-isothiazolidinyl, 3-isothiazolidinyl, 4-isothiazolidinyl, 5-isothiazolidinyl, 1-pyrazolidinyl, 3-pyrazolidinyl, 4-pyrazolidinyl, 5-pyrazolidinyl, 2-oxazolidinyl, 4-oxazolidinyl, 5-oxazolidinyl, 2-thiazolidinyl, 4-thiazolidinyl, 5-thiazolidinyl, 1-imidazolidinyl, 2-imidazolidinyl, 4-imidazolidinyl, 3-oxazolidinyl, 1,2,4-oxadiazolidin-3-yl, 1,2,4-oxadiazolidin-5-yl, 3-thiazolidinyl, 1,2,4-thiadiazolidin-3-yl, 1,2,4-thiadiazolidin-5-yl, 1,2,4-triazolidin-3-yl, 1,2,4-oxadiazolidin-2-yl, 1,2,4-oxadiazolidin-4-yl, 1,3,4-oxadiazolidin-2-yl, 1,2,4-thiadiazolidin-2-yl, 1,2,4-thiadiazolidin-4-yl, 1,3,4-thiadiazolidin-2-yl, 1,2,4-triazolidin-1-yl, 1,3,4-triazolidin-2-yl; six-membered saturated heterocycles like 1-piperidinyl, 2-piperidinyl, 3-piperidinyl, 4-piperidinyl, 1,3-dioxan-5-yl, 1,4-dioxanyl, 1,3-dithian-5-yl, 1,3-dithianyl, 1,3-oxathian-5-yl, 1,4-oxathianyl, 2-tetrahydropyranyl, 3-tetrahydopyranyl, 4-tetrahydropyranyl, 2-tetrahydrothiopyranyl, 3-tetrahydrothiopyranyl, 4-tetrahydrothiopyranyl, 1-hexahydropyridazinyl, 3-hexahydropyridazinyl, 4-hexahydropyridazinyl, 1-hexahydropyrimidinyl, 2-hexahydropyrimidinyl, 4-hexahydropyrimidinyl, 5-hexahydropyrimidinyl, 1-piperazinyl, 2-piperazinyl, 1,3,5-hexahydrotriazin-1-yl, 1,3,5-hexahydrotriazin-2-yl, 1,2,4-hexahydrotriazin-1-yl, 1,2,4-hexahydrotriazin-3-yl, tetrahydro-1,3-oxazin-1-yl, tetrahydro-1,3-oxazin-2-yl, tetrahydro-1,3-oxazin-6-yl, 1-morpholinyl, 2-morpholinyl, 3-morpholinyl;
[0208] 5- or 6 membered heteroaryl: aromatic heteroaryl having 5 or 6 ring members which, in addition to carbon atoms, contains 1 to 4 nitrogen atoms, or 1 to 3 nitrogen atoms and an oxygen or sulphur atom, or an oxygen or a sulphur atom, for example 5-membered aromatic rings like furyl (for example 2-furyl, 3-furyl), thienyl (for example 2-thienyl, 3-thienyl), pyrrolyl (for example pyrrol-2-yl, pyrrol-3-yl), pyrazolyl (for example pyrazol-3-yl, pyrazol-4-yl), isoxazolyl (for example isoxazol-3-yl, isoxazol-4-yl, isoxazol-5-yl), isothiazolyl (for example isothiazol-3-yl, isothiazol-4-yl, isothiazol-5-yl), imidazolyl (for example imidazole-2-yl, imidazole-4-yl), oxazolyl (for example oxazol-2-yl, oxazol-4-yl, oxazol-5-yl), thiazolyl (for example thiazol-2-yl, thiazol-4-yl, thiazol-5-yl), oxadiazolyl (for example 1,2,3-oxadiazol-4-yl, 1,2,3-oxadiazol-5-yl, 1,2,4-oxadiazol-3-yl, 1,2,4-oxadiazol-5-yl, 1,3,4-oxadiazol-2-yl), thiadiazolyl (for example 1,2,3-thiadiazol-4-yl, 1,2,3-thiadiazol-5-yl, 1,2,4-thiadiazol-3-yl, 1,2,4-thiadiazol-5-yl, 1,3,4-thiadiazolyl-2-yl), triazolyl (for example 1,2,3-triazol-4-yl, 1,2,4-triazol-3-yl); 1-tetrazolyl; 6-membered aromatic rings like pyridyl (for example pyridine-2-yl, pyridine-3-yl, pyridine-4-yl), pyrazinyl (for example pyridazin-3-yl, pyridazin-4-yl), pyrimidinyl (for example pyrimidin-2-yl, pyrimidin-4-yl, pyrimidin-5-yl), pyrazin-2-yl, triazinyl (for example 1,3,5-triazin-2-yl, 1,2,4-triazin-3-yl, 1,2,4-triazin-5-yl, 1,2,4-triazin-6-yl);
[0209] 3- to 7-membered carbocyclus: a three- to seven-membered monocyclic, saturated, partial unsaturated or aromatic cycle having three to seven ring members which comprises apart from carbon atoms optionally one or two ring members selected from the group consisting of —N(R¹²)—, —N═N—, —C(═O)—, —O— and —S—.

[0210] The preferred embodiments of the invention mentioned herein below have to be understood as being preferred either independently from each other or in combination with one another.

[0211] According to a preferred embodiment of the invention preference is given to those phenylpyridines of formula (I), wherein the variables, either independently of one another or in combination with one another, have the following meanings:

[0212] Preferred are the phenylpyridines of formula (I), wherein

[0213] R¹ is halogen or C₁-C₄-haloalkyl;
[0214] particularly preferred Cl, CF₃ or CF₂H;
[0215] also particularly preferred C₁-C₄-haloalkyl;
[0216] especially preferred CF₃ or CF₂H;
[0217] more preferred CF₃.

[0218] Also preferred are the phenylpyridines of formula (I) wherein

[0219] R² is H or CH₃;
[0220] particularly preferred H;
[0221] also particularly preferred CH₃.

[0222] Also preferred are the phenylpyridines of formula (I) wherein R³ is F, Cl or Br;
[0223] preferably F or Cl;
[0224] particularly preferred F;
[0225] also particularly preferred Cl.

[0226] Also preferred are the phenylpyridines of formula (I) wherein

[0227] R⁴ is H, F or Cl;
[0228] particularly preferred H or F;
[0229] especially preferred H;
[0230] also particularly preferred H or Cl;
[0231] especially preferred Cl;
[0232] also particularly preferred F or Cl;
[0233] especially preferred F.

[0234] Also preferred are the phenylpyridines of formula (I) wherein

[0235] R⁵ is F, Cl, Br or CN;
[0236] particularly preferred F, Cl or CN;
[0237] especially preferred Cl or CN;
[0238] more preferred Cl;
[0239] also more preferred CN;
[0240] also especially preferred F or Cl;
[0241] more preferred F.

[0242] Also preferred are the phenylpyridines of formula (I) wherein

[0243] R⁶ is H;
[0244] also preferred CH₃.

[0245] Also preferred are the phenylpyridines of formula (I) wherein

[0246] R⁷ is C₁-C₆-alkoxy, C₁-C₆-haloalkoxy, C₃-C₆-alkenyloxy, C₃-C₆-alkynyloxy;
[0247] preferably C₁-C₆-alkoxy or C₁-C₆-haloalkoxy;
[0248] particularly preferred C₁-C₄-alkoxy or C₁-C₄-haloalkoxy;
[0249] also particularly preferred C₁-C₆-alkoxy;
[0250] especially preferred C₁-C₄-alkoxy;
[0251] more preferred OCH₃ or OC₂H₅;
[0252] most preferred is OCH₃.

[0253] Also preferred are the phenylpyridines of formula (I) wherein

[0254] R⁸ is OR⁹, SR⁹, NR¹⁰R¹¹, NR⁹S(O)₂R⁹ or NR⁹S(O)₂NR¹⁰R¹¹;
[0255] particularly preferred OR⁹, NR¹⁰R¹¹, NR⁹S(O)₂R⁹ or NR⁹S(O)₂NR¹⁰R¹¹;
[0256] especially preferred OR⁹ or NR⁹S(O)₂R⁹.

[0257] Also preferred are the phenylpyridines of formula (I) wherein
[0258] R⁹ is hydrogen, C₁-C₆-alkyl, C₃-C₆-alkenyl, C₃-C₆-alkynyl, C₁-C₆-haloalkyl, C₃-C₆-haloalkenyl, C₃-C₆-haloalkynyl, C₁-C₆-cyanoalkyl, C₁-C₆-alkoxy-C₁-C₆-alkyl, C₁-C₆-alkoxy-C₁-C₆-alkoxy-C₁-C₆-alkyl, di(C₁-C₆-alkoxy)C₁-C₆-alkyl, C₁-C₆-halo-alkoxy-C₁-C₆-alkyl, C₃-C₆-alkenyloxy-C₁-C₆-alkyl, C₃-C₆-haloalkenyloxy-C₁-C₆-alkyl, C₃-C₆-alkenyloxy-C₁-C₆-alkoxy-C₁-C₆-alkyl, C₁-C₆-alkylthio-C₁-C₆-alkyl, C₁-C₆-alkylsulfinyl-C₁-C₆-alkyl, C₁-C₆-alkylsulfonyl-C₁-C₆-alkyl, C₁-C₆-alkylcarbonyl-C₁-C₆-alkyl, C₁-C₆-alkoxycarbonyl-C₁-C₆-alkyl, C₁-C₆-haloalkoxycarbonyl-C₁-C₆-alkyl, C₃-C₆-alkenyloxycarbonyl-C₁-C₆-alkyl, amino, (C₁-C₆-alkyl)amino, di(C₁-C₆-alkyl)amino, (C₁-C₆-alkylcarbonyl)amino, amino-C₁-C₆-alkyl, (C₁-C₆-alkyl)amino-C₁-C₆-alkyl, di(C₁-C₆-alkyl)amino-C₁-C₆-alkyl, aminocarbonyl-C₁-C₆-alkyl, (C₁-C₆-alkyl)aminocarbonyl-C₁-C₆-alkyl, di(C₁-C₆-alkyl)aminocarbonyl-C₁-C₆-alkyl, —N═CR¹²R¹³, wherein R¹² and R¹³ independently of one another are H, C₁-C₄-alkyl or phenyl;
   [0259] C₃-C₆-cycloalkyl, C₃-C₆-cycloalkyl-C₁-C₆-alkyl, C₃-C₆-heterocyclyl, phenyl, phenyl-C₁-C₄-alkyl or a 5- or 6 membered heteroaryl,
      [0260] wherein each cycloalkyl, heterocyclyl, phenyl or heteroaryl ring can be substituted by one to four substituents selected from R¹⁴ or a 3- to 7-membered carbocyclus,
         [0261] which carbocyclus optionally has in addition to carbon atoms one or two ring members selected from the group consisting of —N(R¹²)—, —N═N—, —C(═O)—, —O— and —S—, and
         [0262] which carbocyclus is optionally substituted with one to four substituents selected from R¹⁴;
         wherein R¹⁴ is halogen, NO₂, CN, C₁-C₄-alkyl, C₁-C₄-haloalkyl, C₁-C₄-alkoxy or C₁-C₄-alkoxycarbonyl;
   [0263] preferably hydrogen, C₁-C₆-alkyl, C₃-C₆-alkenyl, C₃-C₆-alkynyl, C₁-C₆-haloalkyl, C₁-C₆-alkoxy-C₁-C₆-alkyl, di(C₁-C₆-alkoxy)C₁-C₆-alkyl, C₁-C₆-alkylcarbonyl-C₁-C₆-alkyl, C₁-C₆-alkoxycarbonyl-C₁-C₆-alkyl or C₃-C₆-cycloalkyl-C₁-C₆-alkyl;
   [0264] particularly preferred hydrogen, C₁-C₆-alkyl, C₃-C₆-alkenyl, C₃-C₆-alkynyl or C₁-C₆-haloalkyl;
   [0265] especially preferred hydrogen, C₁-C₆-alkyl, or C₃-C₆-alkynyl;
   [0266] more preferred hydrogen, CH₃, C₂H₅ or CH₂C≡CH.

[0267] Also preferred are the phenylpyridines of formula (I) wherein

[0268] R¹⁰ is H or C₁-C₆-alkyl;
[0269] more preferred H;
[0270] also more preferred C₁-C₆-alkyl.

[0271] Also preferred are the phenylpyridines of formula (I) wherein

[0272] R¹¹ is C₁-C₆-alkyl.

[0273] Also preferred are the phenylpyridines of formula (I) wherein

[0274] R¹² is phenyl or CH₃;
[0275] particularly preferred phenyl;
[0276] also particularly preferred C₁-C₄-alkyl.

[0277] Also preferred are the phenylpyridines of formula (I) wherein

[0278] R¹³ is phenyl or CH₃;
[0279] particularly preferred phenyl;
[0280] also particularly preferred C₁-C₄-alkyl.

[0281] Also preferred are the phenylpyridines of formula (I) wherein

[0282] R¹⁴ is halogen or C₁-C₆-alkyl;
[0283] particularly preferred F, Cl or CH₃;
[0284] also particularly preferred halogen;
[0285] especially preferred F or Cl;
[0286] also particularly preferred C₁-C₆-alkyl;
[0287] especially preferred CH₃.

[0288] Also preferred are the phenylpyridines of formula (I) wherein

[0289] X is O;
[0290] also preferred S.

[0291] Also preferred are the phenylpyridines of formula (I) wherein

[0292] Y is O;
[0293] also preferred S.

[0294] Also preferred are the phenylpyridines of formula (I) wherein R¹ is halogen or C₁-C₄-haloalkyl;
[0295] particularly preferred Cl, CF₃ or CF₂H;
[0296] also particularly preferred C₁-C₄-haloalkyl;
[0297] especially preferred CF₃ or CF₂H;
[0298] more preferred CF₃;

[0299] R² is H or CH₃;
[0300] particularly preferred H;
[0301] also particularly preferred CH₃;

[0302] R³ is F or Cl;
[0303] particularly preferred F;
[0304] also particularly preferred Cl;

[0305] R⁴ is H, F or Cl;
[0306] particularly preferred H or F;
[0307] especially preferred H;
[0308] also particularly preferred H or Cl;
[0309] especially preferred Cl;
[0310] also particularly preferred F or Cl;
[0311] especially preferred F;

[0312] R⁵ is F, Cl, Br or CN;
[0313] particularly preferred F, Cl or CN;
[0314] especially preferred Cl or CN;
[0315] more preferred Cl;
[0316] also more preferred CN;
[0317] also especially preferred F or Cl;
[0318] more preferred F;

[0319] R⁶ is H;
[0320] also preferred CH₃;

[0321] R⁷ is C₁-C₆-alkoxy or C₁-C₆-haloalkoxy;
[0322] particularly preferred C₁-C₄-alkoxy or C₁-C₄-haloalkoxy;
[0323] also particularly preferred C₁-C₆-alkoxy;
[0324] especially preferred C₁-C₄-alkoxy;
[0325] more preferred OCH₃ or OC₂H₅;
[0326] most preferred is OCH₃;

[0327] R⁸ is OR⁹, SR⁹, NR¹⁰R¹¹, NR⁹S(O)₂R⁹ or NR⁹S(O)₂NR¹⁰R¹¹;
[0328] particularly preferred OR⁹, NR¹⁰R¹¹, NR⁹S(O)₂R⁹ or NR⁹S(O)₂NR¹⁰R¹¹;
[0329] especially preferred OR⁹ or NR⁹S(O)₂R⁹;

[0330] R⁹ is hydrogen, C₁-C₆-alkyl, C₃-C₆-alkenyl, C₃-C₆-alkynyl, C₁-C₆-haloalkyl, C₁-C₆-alkoxy-C₁-C₆-alkyl, di(C₁-C₆-alkoxy)C₁-C₆-alkyl, C₁-C₆-alkylcarbonyl-C₁-C₆-alkyl, C₁-C₆-alkoxycarbonyl-C₁-C₆-alkyl or C₃-C₆-cycloalkyl-C₁-C₆-alkyl;
[0331] particularly preferred hydrogen, C₁-C₆-alkyl, C₃-C₆-alkenyl, C₃-C₆-alkynyl or C₁-C₆-haloalkyl;
[0332] especially preferred hydrogen, C₁-C₆-alkyl, or C₃-C₆-alkynyl;
[0333] more preferred hydrogen, CH₃, C₂H₅ or CH₂C≡CH;

[0334] R¹⁰ is H or C₁-C₆-alkyl;
[0335] more preferred H;
[0336] also more preferred C₁-C₆-alkyl;

[0337] R¹¹ is C₁-C₆-alkyl;

[0338] R¹² is phenyl or CH₃;
[0339] particularly preferred phenyl;
[0340] also particularly preferred C₁-C₄-alkyl;

[0341] R¹³ is phenyl or CH₃;
[0342] particularly preferred phenyl;
[0343] also particularly preferred C₁-C₄-alkyl;

[0344] R¹⁴ is halogen or C₁-C₆-alkyl;
[0345] particularly preferred F, CI or CH₃;
[0346] also particularly preferred halogen;
[0347] especially preferred F or Cl;
[0348] also particularly preferred C₁-C₆-alkyl;
[0349] especially preferred CH₃;

[0350] X is O;
[0351] also preferred S; and

[0352] Y is O;
[0353] also preferred S.

[0354] Also preferred are the phenylpyridines of formula (I) wherein

[0355] R¹ is halogen or C₁-C₄-haloalkyl;

[0356] R² is H;

[0357] R³ is Cl or F;

[0358] R⁴ is H or F;

[0359] R⁵ is Cl or CN;

[0360] R⁶ is H;

[0361] R⁷ is C₁-C₆-alkoxy;

[0362] R⁸ is OR⁹, NR¹⁰R¹¹, NR⁹S(O)₂R⁹ or NR⁹S(O)₂NR¹⁰R¹¹, wherein
[0363] R⁹ is hydrogen, C₁-C₆-alkyl, C₃-C₆-alkenyl, C₃-C₆-alkynyl, C₁-C₆-haloalkyl, C₁-C₆-alkoxy-C₁-C₆-alkyl, di(C₁-C₆-alkoxy)C₁-C₆-alkyl, C₁-C₆-alkoxycarbonyl-C₁-C₆-alkyl or C₃-C₆-cycloalkyl-C₁-C₆-alkyl;
[0364] R¹⁰ is H or C₁-C₆-alkyl; and
[0365] R¹¹ is C₁-C₆-alkyl.

[0366] Also preferred are the phenylpyridines of formula (I) wherein

[0367] R¹ is C₁-C₄-haloalkyl;
[0368] R² and R⁶ are H;
[0369] R³, R⁴ and R⁵ are halogen;
[0370] R⁷ is C₁-C₆-alkoxy; and
[0371] R⁸ is OR⁹ or NR⁹S(O)₂R⁹, wherein R⁹ is H, C₁-C₆-alkyl or C₃-C₆-alkynyl.

[0372] Particularly preferred are the phenylpyridines of formula (I) wherein

[0373] R¹ is CF₃;
[0374] R² and R⁶ are H;
[0375] R³ and R⁵ are Cl;
[0376] R⁴ is F;
[0377] R⁷ is C₁-C₆-alkoxy; and
[0378] R⁸ is OR⁹ or NR⁹S(O)₂R⁹, wherein R⁹ is H, C₁-C₆-alkyl or C₃-C₆-alkynyl.

[0379] Also particularly preferred are the phenylpyridines of formula (I) wherein

[0380] R¹ is CF₃;
[0381] R² and R⁶ are H;
[0382] R³ and R⁵ are Cl;
[0383] R⁴ is F;
[0384] R⁷ is OCH₃;
[0385] R⁸ is OR⁹ or NR⁹S(O)₂R⁹, wherein R⁹ is H, CH₃, C₂CH₅, CH(CH₃)₂ or CH₂C≡CH.

[0386] Particular preference is given to phenylpyridines of formula (I.a) (corresponds to phenylpyridines of formula (I), wherein R¹ is CF₃, R² is H, R⁵ is CI, R⁶ is H, X and Y are 0),

[chemical structure]

wherein the variables R³, R⁴, R⁷ and R⁸ have the meanings, in particular the preferred meanings, as defined above.

[0387] Special preference is given to the compounds of the formulae I.a.1 to I.a.264 of Table (I), where the definitions of the variables R³, R⁴, R⁷ and R⁸ are of particular importance for the compounds according to the invention not only in combination with one another but in each case also on their own:

TABLE (I)

| No. | R³ | R⁴ | R⁷ | R⁸ |
|---|---|---|---|---|
| I.a.1 | F | H | OCH₃ | OH |
| I.a.2 | F | H | OCH₃ | OCH₃ |
| I.a.3 | F | H | OCH₃ | OCH₂CH₃ |
| I.a.4 | F | H | OCH₃ | OCH(CH₃)₂ |
| I.a.5 | F | H | OCH₃ | OCH₂CH₂CH₃ |
| I.a.6 | F | H | OCH₃ | OCH₂CH(CH₃)₂ |
| I.a.7 | F | H | OCH₃ | OCH₂CH═CH₂ |
| I.a.8 | F | H | OCH₃ | OCH₃C(CH₃)═CH₂ |
| I.a.9 | F | H | OCH₃ | OCH₂C≡CH |
| I.a.10 | F | H | OCH₃ | OCH₂CF₃ |
| I.a.11 | F | H | OCH₃ | OCH₂CHF₂ |
| I.a.12 | F | H | OCH₃ | OCH₂OCH₃ |
| I.a.13 | F | H | OCH₃ | OCH₂OCH₂CH₃ |
| I.a.14 | F | H | OCH₃ | OCH₂CH₂OCH₃ |
| I.a.15 | F | H | OCH₃ | OCH₂CH₂OCH₂CH₃ |
| I.a.16 | F | H | OCH₃ | OCH₂CH₂CH₂OCH₃ |
| I.a.17 | F | H | OCH₃ | OCH₂CH(OCH₃)₂ |
| I.a.18 | F | H | OCH₃ | OCH₂(CO)OCH₃ |
| I.a.19 | F | H | OCH₃ | OCH₂(CO)OCH₂CH₃ |
| I.a.20 | F | H | OCH₃ | OCH(CH₃)(CO)OCH₃ |
| I.a.21 | F | H | OCH₃ | OCH(CH₃)(CO)OCH₂CH₃ |
| I.a.22 | F | H | OCH₃ | OC(CH₃)₂(CO)OCH₃ |
| I.a.23 | F | H | OCH₃ | OC(CH₃)₂(CO)OCH₂CH₃ |
| I.a.24 | F | H | OCH₃ | OCH₂-cyclopropyl |
| I.a.25 | F | H | OCH₃ | OCH₂-cyclobutyl |
| I.a.26 | F | H | OCH₃ | NHCH₃ |
| I.a.27 | F | H | OCH₃ | N(CH₃)₂ |
| I.a.28 | F | H | OCH₃ | N(CH₃)(CH₂CH₃) |
| I.a.29 | F | H | OCH₃ | N(CH₂CH₃)₂ |
| I.a.30 | F | H | OCH₃ | NHSO₂CH₃ |
| I.a.31 | F | H | OCH₃ | NHSO₂CH₂CH₃ |
| I.a.32 | F | H | OCH₃ | NHSO₂N(CH₃)₂ |
| I.a.33 | F | H | OCH₃ | NHSO₂N(CH₃)[CH(CH₃)₂] |
| I.a.34 | F | H | OCH₂CH₃ | OH |
| I.a.35 | F | H | OCH₂CH₃ | OCH₃ |
| I.a.36 | F | H | OCH₂CH₃ | OCH₂CH₃ |
| I.a.37 | F | H | OCH₂CH₃ | OCH(CH₃)₂ |
| I.a.38 | F | H | OCH₂CH₃ | OCH₂CH₂CH₃ |
| I.a.39 | F | H | OCH₂CH₃ | OCH₂CH(CH₃)₂ |
| I.a.40 | F | H | OCH₂CH₃ | OCH₂CH═CH₂ |
| I.a.41 | F | H | OCH₂CH₃ | OCH₃C(CH₃)═CH₂ |
| I.a.42 | F | H | OCH₂CH₃ | OCH₂C≡CH |
| I.a.43 | F | H | OCH₂CH₃ | OCH₂CF₃ |
| I.a.44 | F | H | OCH₂CH₃ | OCH₂CHF₂ |
| I.a.45 | F | H | OCH₂CH₃ | OCH₂OCH₃ |
| I.a.46 | F | H | OCH₂CH₃ | OCH₂OCH₂CH₃ |
| I.a.47 | F | H | OCH₂CH₃ | OCH₂CH₂OCH₃ |
| I.a.48 | F | H | OCH₂CH₃ | OCH₂CH₂OCH₂CH₃ |
| I.a.49 | F | H | OCH₂CH₃ | OCH₂CH₂CH₂OCH₃ |
| I.a.50 | F | H | OCH₂CH₃ | OCH₂CH(OCH₃)₂ |
| I.a.51 | F | H | OCH₂CH₃ | OCH₂(CO)OCH₃ |
| I.a.52 | F | H | OCH₂CH₃ | OCH₂(CO)OCH₂CH₃ |
| I.a.53 | F | H | OCH₂CH₃ | OCH(CH₃)(CO)OCH₃ |
| I.a.54 | F | H | OCH₂CH₃ | OCH(CH₃)(CO)OCH₂CH₃ |
| I.a.55 | F | H | OCH₂CH₃ | OC(CH₃)₂(CO)OCH₃ |
| I.a.56 | F | H | OCH₂CH₃ | OC(CH₃)₂(CO)OCH₂CH₃ |
| I.a.57 | F | H | OCH₂CH₃ | OCH₂-cyclopropyl |
| I.a.58 | F | H | OCH₂CH₃ | OCH₂-cyclobutyl |
| I.a.59 | F | H | OCH₂CH₃ | NHCH₃ |
| I.a.60 | F | H | OCH₂CH₃ | N(CH₃)₂ |
| I.a.61 | F | H | OCH₂CH₃ | N(CH₃)(CH₂CH₃) |
| I.a.62 | F | H | OCH₂CH₃ | N(CH₂CH₃)₂ |
| I.a.63 | F | H | OCH₂CH₃ | NHSO₂CH₃ |
| I.a.64 | F | H | OCH₂CH₃ | NHSO₂CH₂CH₃ |
| I.a.65 | F | H | OCH₂CH₃ | NHSO₂N(CH₃)₂ |
| I.a.66 | F | H | OCH₂CH₃ | NHSO₂N(CH₃)[CH(CH₃)₂] |
| I.a.67 | F | F | OCH₃ | OH |
| I.a.68 | F | F | OCH₃ | OCH₃ |
| I.a.69 | F | F | OCH₃ | OCH₂CH₃ |
| I.a.70 | F | F | OCH₃ | OCH(CH₃)₂ |
| I.a.71 | F | F | OCH₃ | OCH₂CH₂CH₃ |
| I.a.72 | F | F | OCH₃ | OCH₂CH(CH₃)₂ |
| I.a.73 | F | F | OCH₃ | OCH₂CH═CH₂ |
| I.a.74 | F | F | OCH₃ | OCH₃C(CH₃)═CH₂ |
| I.a.75 | F | F | OCH₃ | OCH₂C≡CH |
| I.a.76 | F | F | OCH₃ | OCH₂CF₃ |
| I.a.77 | F | F | OCH₃ | OCH₂CHF₂ |
| I.a.78 | F | F | OCH₃ | OCH₂OCH₃ |
| I.a.79 | F | F | OCH₃ | OCH₂OCH₂CH₃ |
| I.a.80 | F | F | OCH₃ | OCH₂CH₂OCH₃ |
| I.a.81 | F | F | OCH₃ | OCH₂CH₂OCH₂CH₃ |
| I.a.82 | F | F | OCH₃ | OCH₂CH₂CH₂OCH₃ |
| I.a.83 | F | F | OCH₃ | OCH₂CH(OCH₃)₂ |
| I.a.84 | F | F | OCH₃ | OCH₂(CO)OCH₃ |
| I.a.85 | F | F | OCH₃ | OCH₂(CO)OCH₂CH₃ |
| I.a.86 | F | F | OCH₃ | OCH(CH₃)(CO)OCH₃ |
| I.a.87 | F | F | OCH₃ | OCH(CH₃)(CO)OCH₂CH₃ |
| I.a.88 | F | F | OCH₃ | OC(CH₃)₂(CO)OCH₃ |
| I.a.89 | F | F | OCH₃ | OC(CH₃)₂(CO)OCH₂CH₃ |
| I.a.90 | F | F | OCH₃ | OCH₂-cyclopropyl |
| I.a.91 | F | F | OCH₃ | OCH₂-cyclobutyl |
| I.a.92 | F | F | OCH₃ | NHCH₃ |
| I.a.93 | F | F | OCH₃ | N(CH₃)₂ |
| I.a.94 | F | F | OCH₃ | N(CH₃)(CH₂CH₃) |
| I.a.95 | F | F | OCH₃ | N(CH₂CH₃)₂ |
| I.a.96 | F | F | OCH₃ | NHSO₂CH₃ |
| I.a.97 | F | F | OCH₃ | NHSO₂CH₂CH₃ |
| I.a.98 | F | F | OCH₃ | NHSO₂N(CH₃)₂ |
| I.a.99 | F | F | OCH₃ | NHSO₂N(CH₃)[CH(CH₃)₂] |
| I.a.100 | F | F | OCH₂CH₃ | OH |
| I.a.101 | F | F | OCH₂CH₃ | OCH₃ |
| I.a.102 | F | F | OCH₂CH₃ | OCH₂CH₃ |
| I.a.103 | F | F | OCH₂CH₃ | OCH(CH₃)₂ |
| I.a.104 | F | F | OCH₂CH₃ | OCH₂CH₂CH₃ |
| I.a.105 | F | F | OCH₂CH₃ | OCH₂CH(CH₃)₂ |
| I.a.106 | F | F | OCH₂CH₃ | OCH₂CH═CH₂ |
| I.a.107 | F | F | OCH₂CH₃ | OCH₃C(CH₃)═CH₂ |
| I.a.108 | F | F | OCH₂CH₃ | OCH₂C≡CH |
| I.a.109 | F | F | OCH₂CH₃ | OCH₂CF₃ |
| I.a.110 | F | F | OCH₂CH₃ | OCH₂CHF₂ |
| I.a.111 | F | F | OCH₂CH₃ | OCH₂OCH₃ |
| I.a.112 | F | F | OCH₂CH₃ | OCH₂OCH₂CH₃ |
| I.a.113 | F | F | OCH₂CH₃ | OCH₂CH₂OCH₃ |
| I.a.114 | F | F | OCH₂CH₃ | OCH₂CH₂OCH₂CH₃ |
| I.a.115 | F | F | OCH₂CH₃ | OCH₂CH₂CH₂OCH₃ |
| I.a.116 | F | F | OCH₂CH₃ | OCH₂CH(OCH₃)₂ |
| I.a.117 | F | F | OCH₂CH₃ | OCH₂(CO)OCH₃ |
| I.a.118 | F | F | OCH₂CH₃ | OCH₂(CO)OCH₂CH₃ |
| I.a.119 | F | F | OCH₂CH₃ | OCH(CH₃)(CO)OCH₃ |
| I.a.120 | F | F | OCH₂CH₃ | OCH(CH₃)(CO)OCH₂CH₃ |
| I.a.121 | F | F | OCH₂CH₃ | OC(CH₃)₂(CO)OCH₃ |
| I.a.122 | F | F | OCH₂CH₃ | OC(CH₃)₂(CO)OCH₂CH₃ |
| I.a.123 | F | F | OCH₂CH₃ | OCH₂-cyclopropyl |
| I.a.124 | F | F | OCH₂CH₃ | OCH₂-cyclobutyl |
| I.a.125 | F | F | OCH₂CH₃ | NHCH₃ |
| I.a.126 | F | F | OCH₂CH₃ | N(CH₃)₂ |
| I.a.127 | F | F | OCH₂CH₃ | N(CH₃)(CH₂CH₃) |
| I.a.128 | F | F | OCH₂CH₃ | N(CH₂CH₃)₂ |
| I.a.129 | F | F | OCH₂CH₃ | NHSO₂CH₃ |
| I.a.130 | F | F | OCH₂CH₃ | NHSO₂CH₂CH₃ |
| I.a.131 | F | F | OCH₂CH₃ | NHSO₂N(CH₃)₂ |
| I.a.132 | F | F | OCH₂CH₃ | NHSO₂N(CH₃)[CH(CH₃)₂] |
| I.a.133 | Cl | H | OCH₃ | OH |
| I.a.134 | Cl | H | OCH₃ | OCH₃ |
| I.a.135 | Cl | H | OCH₃ | OCH₂CH₃ |
| I.a.136 | Cl | H | OCH₃ | OCH(CH₃)₂ |
| I.a.137 | Cl | H | OCH₃ | OCH₂CH₂CH₃ |
| I.a.138 | Cl | H | OCH₃ | OCH₂CH(CH₃)₂ |
| I.a.139 | Cl | H | OCH₃ | OCH₂CH═CH₂ |
| I.a.140 | Cl | H | OCH₃ | OCH₃C(CH₃)═CH₂ |
| I.a.141 | Cl | H | OCH₃ | OCH₂C≡CH |
| I.a.142 | Cl | H | OCH₃ | OCH₂CF₃ |
| I.a.143 | Cl | H | OCH₃ | OCH₂CHF₂ |
| I.a.144 | Cl | H | OCH₃ | OCH₂OCH₃ |
| I.a.145 | Cl | H | OCH₃ | OCH₂OCH₂CH₃ |
| I.a.146 | Cl | H | OCH₃ | OCH₂CH₂OCH₃ |
| I.a.147 | Cl | H | OCH₃ | OCH₂CH₂OCH₂CH₃ |
| I.a.148 | Cl | H | OCH₃ | OCH₂CH₂CH₂OCH₃ |
| I.a.149 | Cl | H | OCH₃ | OCH₂CH(OCH₃)₂ |
| I.a.150 | Cl | H | OCH₃ | OCH₂(CO)OCH₃ |
| I.a.151 | Cl | H | OCH₃ | OCH₂(CO)OCH₂CH₃ |
| I.a.152 | Cl | H | OCH₃ | OCH(CH₃)(CO)OCH₃ |
| I.a.153 | Cl | H | OCH₃ | OCH(CH₃)(CO)OCH₂CH₃ |
| I.a.154 | Cl | H | OCH₃ | OC(CH₃)₂(CO)OCH₃ |
| I.a.155 | Cl | H | OCH₃ | OC(CH₃)₂(CO)OCH₂CH₃ |
| I.a.156 | Cl | H | OCH₃ | OCH₂-cyclopropyl |
| I.a.157 | Cl | H | OCH₃ | OCH₂-cyclobutyl |
| I.a.158 | Cl | H | OCH₃ | NHCH₃ |
| I.a.159 | Cl | H | OCH₃ | N(CH₃)₂ |
| I.a.160 | Cl | H | OCH₃ | N(CH₃)(CH₂CH₃) |
| I.a.161 | Cl | H | OCH₃ | N(CH₂CH₃)₂ |
| I.a.162 | Cl | H | OCH₃ | NHSO₂CH₃ |
| I.a.163 | Cl | H | OCH₃ | NHSO₂CH₂CH₃ |
| I.a.164 | Cl | H | OCH₃ | NHSO₂N(CH₃)₂ |
| I.a.165 | Cl | H | OCH₃ | NHSO₂N(CH₃)[CH(CH₃)₂] |
| I.a.166 | Cl | H | OCH₂CH₃ | OH |
| I.a.167 | Cl | H | OCH₂CH₃ | OCH₃ |
| I.a.168 | Cl | H | OCH₂CH₃ | OCH₂CH₃ |
| I.a.169 | Cl | H | OCH₂CH₃ | OCH(CH₃)₂ |
| I.a.170 | Cl | H | OCH₂CH₃ | OCH₂CH₂CH₃ |
| I.a.171 | Cl | H | OCH₂CH₃ | OCH₂CH(CH₃)₂ |
| I.a.172 | Cl | H | OCH₂CH₃ | OCH₂CH═CH₂ |
| I.a.173 | Cl | H | OCH₂CH₃ | OCH₃C(CH₃)═CH₂ |
| I.a.174 | Cl | H | OCH₂CH₃ | OCH₂C≡CH |
| I.a.175 | Cl | H | OCH₂CH₃ | OCH₂CF₃ |
| I.a.176 | Cl | H | OCH₂CH₃ | OCH₂CHF₂ |
| I.a.177 | Cl | H | OCH₂CH₃ | OCH₂OCH₃ |
| I.a.178 | Cl | H | OCH₂CH₃ | OCH₂OCH₂CH₃ |
| I.a.179 | Cl | H | OCH₂CH₃ | OCH₂CH₂OCH₃ |
| I.a.180 | Cl | H | OCH₂CH₃ | OCH₂CH₂OCH₂CH₃ |
| I.a.181 | Cl | H | OCH₂CH₃ | OCH₂CH₂CH₂OCH₃ |
| I.a.182 | Cl | H | OCH₂CH₃ | OCH₂CH(OCH₃)₂ |
| I.a.183 | Cl | H | OCH₂CH₃ | OCH₂(CO)OCH₃ |
| I.a.184 | Cl | H | OCH₂CH₃ | OCH₂(CO)OCH₂CH₃ |
| I.a.185 | Cl | H | OCH₂CH₃ | OCH(CH₃)(CO)OCH₃ |
| I.a.186 | Cl | H | OCH₂CH₃ | OCH(CH₃)(CO)OCH₂CH₃ |
| I.a.187 | Cl | H | OCH₂CH₃ | OC(CH₃)₂(CO)OCH₃ |
| I.a.188 | Cl | H | OCH₂CH₃ | OC(CH₃)₂(CO)OCH₂CH₃ |
| I.a.189 | Cl | H | OCH₂CH₃ | OCH₂-cyclopropyl |
| I.a.190 | Cl | H | OCH₂CH₃ | OCH₂-cyclobutyl |
| I.a.191 | Cl | H | OCH₂CH₃ | NHCH₃ |
| I.a.192 | Cl | H | OCH₂CH₃ | N(CH₃)₂ |
| I.a.193 | Cl | H | OCH₂CH₃ | N(CH₃)(CH₂CH₃) |
| I.a.194 | Cl | H | OCH₂CH₃ | N(CH₂CH₃)₂ |
| I.a.195 | Cl | H | OCH₂CH₃ | NHSO₂CH₃ |
| I.a.196 | Cl | H | OCH₂CH₃ | NHSO₂CH₂CH₃ |
| I.a.197 | Cl | H | OCH₂CH₃ | NHSO₂N(CH₃)₂ |
| I.a.198 | Cl | H | OCH₂CH₃ | NHSO₂N(CH₃)[CH(CH₃)₂] |
| I.a.199 | Cl | F | OCH₃ | OH |
| I.a.200 | Cl | F | OCH₃ | OCH₃ |
| I.a.201 | Cl | F | OCH₃ | OCH₂CH₃ |
| I.a.202 | Cl | F | OCH₃ | OCH(CH₃)₂ |
| I.a.203 | Cl | F | OCH₃ | OCH₂CH₂CH₃ |
| I.a.204 | Cl | F | OCH₃ | OCH₂CH(CH₃)₂ |
| I.a.205 | Cl | F | OCH₃ | OCH₂CH═CH₂ |
| I.a.206 | Cl | F | OCH₃ | OCH₃C(CH₃)═CH₂ |
| I.a.207 | Cl | F | OCH₃ | OCH₂C≡CH |
| I.a.208 | Cl | F | OCH₃ | OCH₂CF₃ |
| I.a.209 | Cl | F | OCH₃ | OCH₂CHF₂ |
| I.a.210 | Cl | F | OCH₃ | OCH₂OCH₃ |
| I.a.211 | Cl | F | OCH₃ | OCH₂OCH₂CH₃ |
| I.a.212 | Cl | F | OCH₃ | OCH₂CH₂OCH₃ |
| I.a.213 | Cl | F | OCH₃ | OCH₂CH₂OCH₂CH₃ |
| I.a.214 | Cl | F | OCH₃ | OCH₂CH₂CH₂OCH₃ |
| I.a.215 | Cl | F | OCH₃ | OCH₂CH(OCH₃)₂ |
| I.a.216 | Cl | F | OCH₃ | OCH₂(CO)OCH₃ |
| I.a.217 | Cl | F | OCH₃ | OCH₂(CO)OCH₂CH₃ |
| I.a.218 | Cl | F | OCH₃ | OCH(CH₃)(CO)OCH₃ |
| I.a.219 | Cl | F | OCH₃ | OCH(CH₃)(CO)OCH₂CH₃ |
| I.a.220 | Cl | F | OCH₃ | OC(CH₃)₂(CO)OCH₃ |
| I.a.221 | Cl | F | OCH₃ | OC(CH₃)₂(CO)OCH₂CH₃ |
| I.a.222 | Cl | F | OCH₃ | OCH₂-cyclopropyl |
| I.a.223 | Cl | F | OCH₃ | OCH₂-cyclobutyl |
| I.a.224 | Cl | F | OCH₃ | NHCH₃ |
| I.a.225 | Cl | F | OCH₃ | N(CH₃)₂ |
| I.a.226 | Cl | F | OCH₃ | N(CH₃)(CH₂CH₃) |
| I.a.227 | Cl | F | OCH₃ | N(CH₂CH₃)₂ |
| I.a.228 | Cl | F | OCH₃ | NHSO₂CH₃ |
| I.a.229 | Cl | F | OCH₃ | NHSO₂CH₂CH₃ |
| I.a.230 | Cl | F | OCH₃ | NHSO₂N(CH₃)₂ |
| I.a.231 | Cl | F | OCH₃ | NHSO₂N(CH₃)[CH(CH₃)₂] |
| I.a.232 | Cl | F | OCH₂CH₃ | OH |
| I.a.233 | Cl | F | OCH₂CH₃ | OCH₃ |
| I.a.234 | Cl | F | OCH₂CH₃ | OCH₂CH₃ |
| I.a.235 | Cl | F | OCH₂CH₃ | OCH(CH₃)₂ |
| I.a.236 | Cl | F | OCH₂CH₃ | OCH₂CH₂CH₃ |
| I.a.237 | Cl | F | OCH₂CH₃ | OCH₂CH(CH₃)₂ |
| I.a.238 | Cl | F | OCH₂CH₃ | OCH₂CH═CH₂ |
| I.a.239 | Cl | F | OCH₂CH₃ | OCH₃C(CH₃)═CH₂ |
| I.a.240 | Cl | F | OCH₂CH₃ | OCH₂C≡CH |
| I.a.241 | Cl | F | OCH₂CH₃ | OCH₂CF₃ |
| I.a.242 | Cl | F | OCH₂CH₃ | OCH₂CHF₂ |
| I.a.243 | Cl | F | OCH₂CH₃ | OCH₂OCH₃ |
| I.a.244 | Cl | F | OCH₂CH₃ | OCH₂OCH₂CH₃ |
| I.a.245 | Cl | F | OCH₂CH₃ | OCH₂CH₂OCH₃ |
| I.a.246 | Cl | F | OCH₂CH₃ | OCH₂CH₂OCH₂CH₃ |
| I.a.247 | Cl | F | OCH₂CH₃ | OCH₂CH₂CH₂OCH₃ |
| I.a.248 | Cl | F | OCH₂CH₃ | OCH₂CH(OCH₃)₂ |
| I.a.249 | Cl | F | OCH₂CH₃ | OCH₂(CO)OCH₃ |
| I.a.250 | Cl | F | OCH₂CH₃ | OCH₂(CO)OCH₂CH₃ |
| I.a.251 | Cl | F | OCH₂CH₃ | OCH(CH₃)(CO)OCH₃ |
| I.a.252 | Cl | F | OCH₂CH₃ | OCH(CH₃)(CO)OCH₂CH₃ |
| I.a.253 | Cl | F | OCH₂CH₃ | OC(CH₃)₂(CO)OCH₃ |
| I.a.254 | Cl | F | OCH₂CH₃ | OC(CH₃)₂(CO)OCH₂CH₃ |
| I.a.255 | Cl | F | OCH₂CH₃ | OCH₂-cyclopropyl |
| I.a.256 | Cl | F | OCH₂CH₃ | OCH₂-cyclobutyl |
| I.a.257 | Cl | F | OCH₂CH₃ | NHCH₃ |
| I.a.258 | Cl | F | OCH₂CH₃ | N(CH₃)₂ |
| I.a.259 | Cl | F | OCH₂CH₃ | N(CH₃)(CH₂CH₃) |
| I.a.260 | Cl | F | OCH₂CH₃ | N(CH₂CH₃)₂ |
| I.a.261 | Cl | F | OCH₂CH₃ | NHSO₂CH₃ |
| I.a.262 | Cl | F | OCH₂CH₃ | NHSO₂CH₂CH₃ |
| I.a.263 | Cl | F | OCH₂CH₃ | NHSO₂N(CH₃)₂ |
| I.a.264 | Cl | F | OCH₂CH₃ | NHSO₂N(CH₃)[CH(CH₃)₂] |

[0388] Also preferred are the phenylpyridines of formula (I.b), particularly preferred the phenylpyridines of formulae (I.b.1) to (I.b.264), which differ from the corresponding phenylpyridines of formulae (I.a) as well as (I.a.1) to (I.a.264) only in that R⁵ is CN:

[chemical structure]

[0389] Also preferred are the phenylpyridines of formula (I.c), particularly preferred the phenylpyridines of formulae (I.c.1) to (I.c.264), which differ from the corresponding phenylpyridines of formulae (I.a) as well as (I.a.1) to (I.a.264) only in that R⁵ is F:

[chemical structure]

[0390] To widen the spectrum of action and to achieve synergistic effects, the phenylpyridines of formula (I) may be mixed with a large number of representatives of other herbicidal or growth-regulating active ingredient groups and then applied concomitantly. Suitable components for mixtures are, for example, herbicides from the classes of the acetamides, amides, aryloxyphenoxypropionates, benzamides, benzofuran, benzoic acids, benzothiadiazinones, bipyridylium, carbamates, chloroacetamides, chlorocarboxylic acids, cyclohexanediones, dinitroanilines, dinitrophenol, diphenyl ether, glycines, imidazolinones, isoxazoles, isoxazolidinones, nitriles, N-phenylphthalimides, oxadiazoles, oxazolidinediones, oxyacetamides, phenoxycarboxylic acids, phenylcarbamates, phenylpyrazoles, phenylpyrazolines, phenylpyridazines, phosphinic acids, phosphoroamidates, phosphorodithioates, phthalamates, pyrazoles, pyridazinones, pyridines, pyridinecarboxylic acids, pyridinecarboxamides, pyrimidinediones, pyrimidinyl(thio)benzoates, quinolinecarboxylic acids, semicarbazones, sulfonylaminocarbonyltriazolinones, sulfonylureas, tetrazolinones, thiadiazoles, thiocarbamates, triazines, triazinones, triazoles, triazolinones, triazolocarboxamides, triazolopyrimidines, triketones, uracils, ureas.

[0391] It may furthermore be beneficial to apply the phenylpyridines of formula (I) alone or in combination with other herbicides, or else in the form of a mixture with other crop protection agents, for example together with agents for controlling pests or phytopathogenic fungi or bacteria. Also of interest is the miscibility with mineral salt solutions, which are employed for treating nutritional and trace element deficiencies. Other additives such as non-phytotoxic oils and oil concentrates may also be added.

[0392] In one embodiment of the present invention the compositions disclosed herein comprise at least one phenylpyridine of formula (I) (compound A) and at least one further active compound selected from herbicides B, preferably herbicides B of class b1) to b15), and safeners C (compound C).

[0393] In another embodiment of the present invention the compositions according to the present invention comprise at least one phenylpyridine of formula (I) and at least one further active compound B (herbicide B).

[0394] The further herbicidal compound B (component B) is preferably selected from the herbicides of class b1) to b15):

[0395] B) herbicides of class b1) to b15):
[0396] b1) lipid biosynthesis inhibitors;
[0397] b2) acetolactate synthase inhibitors (ALS inhibitors);
[0398] b3) photosynthesis inhibitors;
[0399] b4) protoporphyrinogen-IX oxidase inhibitors,
[0400] b5) bleacher herbicides;
[0401] b6) enolpyruvyl shikimate 3-phosphate synthase inhibitors (EPSP inhibitors);
[0402] b7) glutamine synthetase inhibitors;
[0403] b8) 7,8-dihydropteroate synthase inhibitors (DHP inhibitors);
[0404] b9) mitosis inhibitors;
[0405] b10) inhibitors of the synthesis of very long chain fatty acids (VLCFA inhibitors);
[0406] b11) cellulose biosynthesis inhibitors;
[0407] b12) decoupler herbicides;
[0408] b13) auxinic herbicides;
[0409] b14) auxin transport inhibitors; and
[0410] b15) other herbicides selected from the group consisting of bromobutide, chlorflurenol, chlorflurenol-methyl, cinmethylin, cumyluron, dalapon, dazomet, difenzoquat, difenzoquat-metilsulfate, dimethipin, DSMA, dymron, endothal and its salts, etobenzanid, flamprop, flamprop-isopropyl, flamprop-methyl, flamprop-M-isopropyl, flamprop-M-methyl, flurenol, flurenol-butyl, flurprimidol, fosamine, fosamine-ammonium, indanofan, indaziflam, maleic hydrazide, mefluidide, metam, methiozolin (CAS 403640-27-7), methyl azide, methyl bromide, methyl-dymron, methyl iodide, MSMA, oleic acid, oxaziclomefone, pelargonic acid, pyributicarb, quinoclamine, triaziflam, tridiphane and 6-chloro-3-(2-cyclopropyl-6-methylphenoxy)-4-pyridazinol (CAS 499223-49-3) and its salts and esters;
   including their agriculturally acceptable salts or derivatives.

[0411] Preference is given to those compositions according to the present invention comprising at least one herbicide B selected from herbicides of class b2, b3, b4, b5, b6, B7, b9 b10 and b13.

[0412] Specific preference is given to those compositions according to the present invention which comprise at least one herbicide B selected from the herbicides of class b4, b6, b7, b9, b10 and b13.

[0413] Particular preference is given to those compositions according to the present invention which comprise at least one herbicide B selected from the herbicides of class b4, b6, b10 and b13.

[0414] Examples of herbicides B which can be used in combination with the phenylpyridines of formula (I) according to the present invention are:

[0415] b1) from the group of the lipid biosynthesis inhibitors:

[0416] ACC-herbicides such as alloxydim, alloxydim-sodium, butroxydim, clethodim, clodinafop, clodinafop-propargyl, cycloxydim, cyhalofop, cyhalofop-butyl, diclofop, diclofop-methyl, fenoxaprop, fenoxaprop-ethyl, fenoxaprop-P, fenoxaprop-P-ethyl, fluazifop, fluazifop-butyl, fluazifop-P, fluazifop-P-butyl, haloxyfop, haloxyfop-methyl, haloxyfop-P, haloxyfop-P-methyl, metamifop, pinoxaden, profoxydim, propaquizafop, quizalofop, quizalofop-ethyl, quizalofop-tefuryl, quizalofop-P, quizalofop-P-ethyl, quizalofop-P-tefuryl, sethoxydim, tepraloxydim, tralkoxydim, 4-(4′-Chloro-4-cyclopropyl-2′-fluoro[1,1′-biphenyl]-3-yl)-5-hydroxy-2,2,6,6-tetramethyl-2H-pyran-3(6H)-one (CAS 1312337-72-6); 4-(2′,4′-Dichloro-4-cyclopropyl[1,1′-biphenyl]-3-yl)-5-hydroxy-2,2,6,6-tetramethyl-2H-pyran-3(6H)-one (CAS 1312337-45-3); 4-(4′-Chloro-4-ethyl-2′-fluoro[1,1′-biphenyl]-3-yl)-5-hydroxy-2,2,6,6-tetramethyl-2H-pyran-3(6H)-one (CAS 1033757-93-5); 4-(2′,4′-Dichloro-4-ethyl[1,1′-biphenyl]-3-yl)-2,2,6,6-tetramethyl-2H-pyran-3,5(4H,6H)-dione (CAS 1312340-84-3); 5-(Acetyloxy)-4-(4′-chloro-4-cyclopropyl-2′-fluoro[1,1′-biphenyl]-3-yl)-3,6-dihydro-2,2,6,6-tetramethyl-2H-pyran-3-one (CAS 1312337-48-6); 5-(Acetyloxy)-4-(2′,4′-dichloro-4-cyclopropyl-[1,1′-biphenyl]-3-yl)-3,6-dihydro-2,2,6,6-tetramethyl-2H-pyran-3-one; 5-(Acetyloxy)-4-(4′-chloro-4-ethyl-2′-fluoro[1,1′-biphenyl]-3-yl)-3,6-dihydro-2,2,6,6-tetramethyl-2H-pyran-3-one (CAS 1312340-82-1); 5-(Acetyloxy)-4-(2′,4′-dichloro-4-ethyl[1,1′-biphenyl]-3-yl)-3,6-dihydro-2,2,6,6-tetramethyl-2H-pyran-3-one (CAS 1033760-55-2); 4-(4′-Chloro-4-cyclopropyl-2′-fluoro[1,1′-biphenyl]-3-yl)-5,6-dihydro-2,2,6,6-tetramethyl-5-oxo-2H-pyran-3-yl carbonic acid methyl ester (CAS 1312337-51-1); 4-(2′,4′-Dichloro-4-cyclopropyl-[1,1′-biphenyl]-3-yl)-5,6-dihydro-2,2,6,6-tetramethyl-5-oxo-2H-pyran-3-yl carbonic acid methyl ester; 4-(4′-Chloro-4-ethyl-2′-fluoro[1,1′-biphenyl]-3-yl)-5,6-dihydro-2,2,6,6-tetramethyl-5-oxo-2H-pyran-3-yl carbonic acid methyl ester (CAS 1312340-83-2); 4-(2′,4′-Dichloro-4-ethyl[1,1′-biphenyl]-3-yl)-5,6-dihydro-2,2,6,6-tetramethyl-5-oxo-2H-pyran-3-yl carbonic acid methyl ester (CAS 1033760-58-5); and non ACC herbicides such as benfuresate, butylate, cycloate, dalapon, dimepiperate, EPTC, esprocarb, ethofumesate, flupropanate, molinate, orbencarb, pebulate, prosulfocarb, TCA, thiobencarb, tiocarbazil, triallate and vernolate;

[0417] b2) from the group of the ALS inhibitors:

[0418] sulfonylureas such as amidosulfuron, azimsulfuron, bensulfuron, bensulfuron-methyl, chlorimuron, chlorimuron-ethyl, chlorsulfuron, cinosulfuron, cyclosulfamuron, ethametsulfuron, ethametsulfuron-methyl, ethoxysulfuron, flazasulfuron, flucetosulfuron, flupyrsulfuron, flupyrsulfuron-methyl-sodium, foramsulfuron, halosulfuron, halosulfuron-methyl, imazosulfuron, iodosulfuron, iodosulfuron-methyl-sodium, iofensulfuron, iofensulfuron-sodium, mesosulfuron, metazosulfuron, metsulfuron, metsulfuron-methyl, nicosulfuron, orthosulfamuron, oxasulfuron, primisulfuron, primisulfuron-methyl, propyrisulfuron, prosulfuron, pyrazosulfuron, pyrazosulfuron-ethyl, rimsulfuron, sulfometuron, sulfometuron-methyl, sulfosulfuron, thifensulfuron, thifensulfuron-methyl, triasulfuron, tribenuron, tribenuron-methyl, trifloxysulfuron, triflusulfuron, triflusulfuron-methyl and tritosulfuron,

[0419] imidazolinones such as imazamethabenz, imazamethabenz-methyl, imazamox, imazapic, imazapyr, imazaquin and imazethapyr, triazolopyrimidine herbicides and sulfonanilides such as cloransulam, cloransulam-methyl, diclosulam, flumetsulam, florasulam, metosulam, penoxsulam, pyrimisulfan and pyroxsulam,

[0420] pyrimidinylbenzoates such as bispyribac, bispyribac-sodium, pyribenzoxim, pyriftalid, pyriminobac, pyriminobac-methyl, pyrithiobac, pyrithiobac-sodium, 4-[[[2-[(4,6-dimethoxy-2-pyrimidinyl)oxy]phenyl]methyl]amino]-benzoic acid-1-methylethyl ester (CAS 420138-41-6), 4-[[[2-[(4,6-dimethoxy-2-pyrimidinyl)oxy]phenyl]methyl]amino]-benzoic acid propyl ester (CAS 420138-40-5), N-(4-bromophenyl)-2-[(4,6-dimethoxy-2-pyrimidinyl)oxy]benzenemethanamine (CAS 420138-01-8),

[0421] sulfonylaminocarbonyl-triazolinone herbicides such as flucarbazone, flucarbazone-sodium, propoxycarbazone, propoxycarbazone-sodium, thiencarbazone and thiencarbazone-methyl; and triafamone;

[0422] among these, a preferred embodiment of the invention relates to those compositions comprising at least one imidazolinone herbicide;

[0423] b3) from the group of the photosynthesis inhibitors:

[0424] amicarbazone, inhibitors of the photosystem II, e.g. triazine herbicides, including of chlorotriazine, triazinones, triazindiones, methylthiotriazines and pyridazinones such as ametryn, atrazine, chloridazone, cyanazine, desmetryn, dimethametryn, hexazinone, metribuzin, prometon, prometryn, propazine, simazine, simetryn, terbumeton, terbuthylazin, terbutryn and trietazin, aryl urea such as chlorobromuron, chlorotoluron, chloroxuron, dimefuron, diuron, fluometuron, isoproturon, isouron, linuron, metamitron, methabenzthiazuron, metobenzuron, metoxuron, monolinuron, neburon, siduron, tebuthiuron and thiadiazuron, phenyl carbamates such as desmedipham, karbutilat, phenmedipham, phenmedipham-ethyl, nitrile herbicides such as bromofenoxim, bromoxynil and its salts and esters, ioxynil and its salts and esters, uraciles such as bromacil, lenacil and terbacil, and bentazon and bentazon-sodium, pyridate, pyridafol, pentanochlor and propanil and inhibitors of the photosystem I such as diquat, diquat-dibromide, paraquat, paraquat-dichloride and paraquat-dimetilsulfate. Among these, a preferred embodiment of the invention relates to those compositions comprising at least one aryl urea herbicide. Among these, likewise a preferred embodiment of the invention relates to those compositions comprising at least one triazine herbicide. Among these, likewise a preferred embodiment of the invention relates to those compositions comprising at least one nitrile herbicide;

[0425] b4) from the group of the protoporphyrinogen-IX oxidase inhibitors:

[0426] acifluorfen, acifluorfen-sodium, azafenidin, bencarbazone, benzfendizone, bifenox, butafenacil, carfentrazone, carfentrazone-ethyl, chlomethoxyfen, cinidon-ethyl, fluazolate, flufenpyr, flufenpyr-ethyl, flumiclorac, flumiclorac-pentyl, flumioxazin, fluoroglycofen, fluoroglycofen-ethyl, fluthiacet, fluthiacet-methyl, fomesafen, halosafen, lactofen, oxadiargyl, oxadiazon, oxyfluorfen, pentoxazone, profluazol, pyraclonil, pyraflufen, pyraflufen-ethyl, saflufenacil, sulfentrazone, thidiazimin, tiafenacil, ethyl [3-[2-chloro-4-fluoro-5-(1-methyl-6-trifluoromethyl-2,4-dioxo-1,2,3,4-tetrahydropyrimidin-3-yl)phenoxy]-2-pyridyloxy]acetate (CAS 353292-31-6; S-3100), N-ethyl-3-(2,6-dichloro-4-trifluoromethylphenoxy)-5-methyl-1 H-pyrazole-1-carboxamide (CAS 452098-92-9), N-tetrahydrofurfuryl-3-(2,6-dichloro-4-trifluoromethylphenoxy)-5-methyl-1 H-pyrazole-1-carboxamide (CAS 915396-43-9), N-ethyl-3-(2-chloro-6-fluoro-4-trifluoromethylphenoxy)-5-methyl-1 H-pyrazole-1-carboxamide (CAS 452099-05-7), N-tetrahydrofurfuryl-3-(2-chloro-6-fluoro-4-trifluoromethylphenoxy)-5-methyl-1 H-pyrazole-1-carboxamide (CAS 452100-03-7), 3-[7-fluoro-3-oxo-4-(prop-2-ynyl)-3,4-dihydro-2H-benzo[1,4]oxazin-6-yl]-1,5-dimethyl-6-thioxo-[1,3,5]triazinan-2,4-dione, 1,5-dimethyl-6-th ioxo-3-(2,2,7-trifluoro-3-oxo-4-(prop-2-ynyl)-3,4-dihydro-2H-benzo[b][1,4]oxazin-6-yl)-1,3,5-triazinane-2,4-dione (CAS 1258836-72-4), 2-(2,2,7-Trifluoro-3-oxo-4-prop-2-ynyl-3,4-dihydro-2H-benzo[1,4]oxazin-6-yl)-4,5,6,7-tetrahydro-isoindole-1,3-dione, 1-Methyl-6-trifluoromethyl-3-(2,2,7-trifluoro-3-oxo-4-prop-2-ynyl-3,4-dihydro-2H-benzo[1,4]oxazin-6-yl)-1 H-pyrimidine-2,4-dione, methyl (E)-4-[2-chloro-5-[4-chloro-5-(difluoromethoxy)-1 H-methyl-pyrazol-3-yl]-4-fluoro-phenoxy]-3-methoxy-but-2-enoate [CAS 948893-00-3], and 3-[7-Chloro-5-fluoro-2-(trifluoromethyl)-1 H-benzimidazol-4-yl]-1-methyl-6-(trifluoromethyl)-1 H-pyrimidine-2,4-dione (CAS 212754-02-4);

[0427] b5) from the group of the bleacher herbicides:

[0428] PDS inhibitors: beflubutamid, diflufenican, fluridone, flurochloridone, flurtamone, norflurazon, picolinafen, and 4-(3-trifluoromethylphenoxy)-2-(4-trifluoromethylphenyl)-pyrimidine (CAS 180608-33-7), HPPD inhibitors: benzobicyclon, benzofenap, clomazone, fenquintrione, isoxaflutole, mesotrione, pyrasulfotole, pyrazolynate, pyrazoxyfen, sulcotrione, tefuryltrione, tembotrione, topramezone and bicyclopyrone, bleacher, unknown target: aclonifen, amitrole and flumeturon;

[0429] b6) from the group of the EPSP synthase inhibitors:

[0430] glyphosate, glyphosate-isopropylammonium, glyposate-potassium and glyphosate-trimesium (sulfosate);

[0431] b7) from the group of the glutamine synthase inhibitors:

[0432] bilanaphos (bialaphos), bilanaphos-sodium, glufosinate, glufosinate-P and glufosinate-ammonium;

[0433] b8) from the group of the DHP synthase inhibitors:

[0434] asulam;

[0435] b9) from the group of the mitosis inhibitors:

[0436] compounds of group K1: dinitroanilines such as benfluralin, butralin, dinitramine, ethalfluralin, fluchloralin, oryzalin, pendimethalin, prodiamine and trifluralin, phosphoramidates such as amiprophos, amiprophos-methyl, and butamiphos, benzoic acid herbicides such as chlorthal, chlorthal-dimethyl, pyridines such as dithiopyr and thiazopyr, benzamides such as propyzamide and tebutam; compounds of group K2: chlorpropham, propham and carbetamide, among these, compounds of group K1, in particular dinitroanilines are preferred;

[0437] b10) from the group of the VLCFA inhibitors:

[0438] chloroacetamides such as acetochlor, alachlor, butachlor, dimethachlor, dimethenamid, dimethenamid-P, metazachlor, metolachlor, metolachlor-S, pethoxamid, pretilachlor, propachlor, propisochlor and thenylchlor, oxyacetanilides such as flufenacet and mefenacet, acetanilides such as diphenamid, naproanilide, napropamide and napropamide-M, tetrazolinones such fentrazamide, and other herbicides such as anilofos, cafenstrole, fenoxasulfone, ipfencarbazone, piperophos, pyroxasulfone and isoxazoline compounds of the formulae II.1, II.2, II.3, II.4, II.5, II.6, II.7, II.8 and II.9

[chemical structure]

[chemical structure]

[0439] the isoxazoline compounds of the formula (I)I are known in the art, e.g. from WO 2006/024820, WO 2006/037945, WO 2007/071900 and WO 2007/096576;
[0440] among the VLCFA inhibitors, preference is given to chloroacetamides and oxyacetamides;

[0441] b11) from the group of the cellulose biosynthesis inhibitors:

[0442] chlorthiamid, dichlobenil, flupoxam, isoxaben and 1-Cyclohexyl-5-pentafluorphenyloxy-1⁴-[1,2,4,6]thiatriazin-3-ylamine;

[0443] b12) from the group of the decoupler herbicides:

[0444] dinoseb, dinoterb and DNOC and its salts;

[0445] b13) from the group of the auxinic herbicides:

[0446] 2,4-D and its salts and esters such as clacyfos, 2,4-DB and its salts and esters, aminocyclopyrachlor and its salts and esters, aminopyralid and its salts such as aminopyralid-dimethylammonium, aminopyralid-tris(2-hydroxypropyl)ammonium and its esters, benazolin, benazolin-ethyl, chloramben and its salts and esters, clomeprop, clopyralid and its salts and esters, dicamba and its salts and esters, dichlorprop and its salts and esters, dichlorprop-P and its salts and esters, fluroxypyr, fluroxypyr-butometyl, fluroxypyr-meptyl, halauxifen and its salts and esters (CAS 943832-60-8); MCPA and its salts and esters, MCPA-thioethyl, MCPB and its salts and esters, mecoprop and its salts and esters, mecoprop-P and its salts and esters, picloram and its salts and esters, quinclorac, quinmerac, TBA (2,3,6) and its salts and esters and triclopyr and its salts and esters;

[0447] b14) from the group of the auxin transport inhibitors: diflufenzopyr, diflufenzopyr-sodium, naptalam and naptalam-sodium;

[0448] b15) from the group of the other herbicides: bromobutide, chlorflurenol, chlorflurenol-methyl, cinmethylin, cumyluron, cyclopyrimorate (CAS 499223-49-3) and its salts and esters, dalapon, dazomet, difenzoquat, difenzoquat-metilsulfate, dimethipin, DSMA, dymron, endothal and its salts, etobenzanid, flamprop, flamprop-isopropyl, flamprop-methyl, flamprop-M-isopropyl, flamprop-M-methyl, flurenol, flurenol-butyl, flurprimidol, fosamine, fosamine-ammonium, indanofan, indaziflam, maleic hydrazide, mefluidide, metam, methiozolin (CAS 403640-27-7), methyl azide, methyl bromide, methyl-dymron, methyl iodide, MSMA, oleic acid, oxaziclomefone, pelargonic acid, pyributicarb, quinoclamine, triaziflam and tridiphane.

[0449] Active compounds B and C having a carboxyl group can be employed in the form of the acid, in the form of an agriculturally suitable salt as mentioned above or else in the form of an agriculturally acceptable derivative in the compositions according to the invention.

[0450] In the case of dicamba, suitable salts include those, where the counterion is an agriculturally acceptable cation. For example, suitable salts of dicamba are dicamba-sodium, dicamba-potassium, dicamba-methylammonium, dicamba-dimethylammonium, dicamba-isopropylammonium, dicamba-diglycolamine, dicamba-olamine, dicamba-diolamine, dicamba-trolamine, dicamba-N,N-bis-(3-aminopropyl)methylamine and dicamba-diethylenetriamine. Examples of a suitable ester are dicamba-methyl and dicamba-butotyl.

[0451] Suitable salts of glyphosate are for example glyphosate-ammonium, glyphosate-diammonium, glyphoste-dimethylammonium, glyphosate-isopropylammonium, glyphosate-potassium, glyphosate-sodium, glyphosate-trimesium as well as the ethanolamine and diethanolamine salts, preferably glyphosate-diammonium, glyphosate-isopropylammonium and glyphosate-trimesium (sulfosate).

[0452] A suitable salt of glufosinate is for example glufosinate-ammonium.

[0453] A suitable salt of glufosinate-P is for example glufosinate-P-ammonium.

[0454] Particularly preferred herbicides B are the herbicides B as defined above; in particular the herbicides B.1-B.189 listed below in table B:

TABLE B

| | Herbicide B |
|---|---|
| A.1 | clethodim |
| A.2 | clodinafop-propargyl |
| A.3 | cycloxydim |
| A.4 | cyhalofop-butyl |
| A.5 | fenoxaprop-ethyl |
| A.6 | fenoxaprop-P-ethyl |
| A.7 | metamifop |
| A.8 | pinoxaden |
| A.9 | profoxydim |
| A.10 | sethoxydim |
| A.11 | tepraloxydim |
| A.12 | tralkoxydim |
| A.13 | esprocarb |
| A.14 | ethofumesate |
| A.15 | molinate |
| A.16 | prosulfocarb |
| A.17 | thiobencarb |
| A.18 | triallate |
| A.19 | bensulfuron-methyl |
| A.20 | bispyribac-sodium |
| A.21 | cloransulam-methyl |
| A.22 | chlorsulfuron |
| A.23 | clorimuron |
| A.24 | cyclosulfamuron |
| A.25 | diclosulam |
| A.26 | florasulam |
| A.27 | flumetsulam |
| A.28 | flupyrsulfuron-methyl-sodium |
| A.29 | foramsulfuron |
| A.30 | imazamox |
| A.31 | imazamox-ammonium |
| A.32 | imazapic |
| A.33 | imazapic-ammonium |
| A.34 | imazapic-isopropylammonium |
| A.35 | imazapyr |
| A.36 | imazapyr-ammonium |
| A.37 | imazapyr-isopropylammonium |
| A.38 | imazaquin |
| A.39 | imazaquin-ammonium |
| A.40 | imazethapyr |
| A.41 | imazethapyr-ammonium |
| A.42 | imazethapyr-isopropylammonium |
| A.43 | imazosulfuron |
| A.44 | iodosulfuron-methyl-sodium |
| A.45 | iofensulfuron |
| A.46 | iofensulfuron-sodium |
| A.47 | mesosulfuron-methyl |
| A.48 | metazosulfuron |
| A.49 | metsulfuron-methyl |
| A.50 | metosulam |
| A.51 | nicosulfuron |
| A.52 | penoxsulam |
| A.53 | propoxycarbazon-sodium |
| A.54 | pyrazosulfuron-ethyl |
| A.55 | pyribenzoxim |
| A.56 | pyriftalid |
| A.57 | pyroxsulam |
| A.58 | propyrisulfuron |
| A.59 | rimsulfuron |
| A.60 | sulfosulfuron |
| A.61 | thiencarbazone-methyl |
| A.62 | thifensulfuron-methyl |
| A.63 | tribenuron-methyl |
| A.64 | tritosulfuron |
| A.65 | triafamone |
| A.66 | ametryne |
| A.67 | atrazine |
| A.68 | bentazon |
| A.69 | bromoxynil |
| A.70 | bromoxynil-octanoate |
| A.71 | bromoxynil-heptanoate |
| A.72 | bromoxynil-potassium |
| A.73 | diuron |
| A.74 | fluometuron |
| A.75 | hexazinone |
| A.76 | isoproturon |
| A.77 | linuron |
| A.78 | metamitron |
| A.79 | metribuzin |
| A.80 | propanil |
| A.81 | simazin |
| A.82 | terbuthylazine |
| A.83 | terbutryn |
| A.84 | paraquat-dichloride |
| A.85 | acifluorfen |
| A.86 | butafenacil |
| A.87 | carfentrazone-ethyl |
| A.88 | flumioxazin |
| A.89 | fomesafen |
| A.90 | oxadiargyl |
| A.91 | oxyfluorfen |
| A.92 | saflufenacil |
| A.93 | sulfentrazone |
| A.94 | ethyl [3-[2-chloro-4-fluoro-5-(1-methyl-6-trifluoromethyl- |
| | 2,4-dioxo-1,2,3,4-tetrahydro-pyrimidin-3-yl)phenoxy]-2- |
| | pyridyloxy]acetate (CAS 353292-31-6) |
| A.95 | 1,5-dimethyl-6-thioxo-3-(2,2,7-trifluoro-3-oxo-4-(prop-2-ynyl)- |
| | 3,4-dihydro-2H-benzo[b][1,4]-oxazin-6-yl)-1,3,5-triazinane- |
| | 2,4-dione (CAS 1258836-72-4) |
| A.96 | benzobicyclon |
| A.97 | clomazone |
| A.98 | diflufenican |
| A.99 | flurochloridone |
| A.100 | isoxaflutole |
| A.101 | mesotrione |
| A.102 | norflurazone |
| A.103 | picolinafen |
| A.104 | sulcotrione |
| A.105 | tefuryltrione |
| A.106 | tembotrione |
| A.107 | topramezone |
| A.108 | topramezone-sodium |
| A.109 | bicyclopyrone |
| A.110 | amitrole |
| A.111 | fluometuron |
| A.112 | fenquintrione |
| A.113 | glyphosate |
| A.114 | glyphosate-ammonium |
| A.115 | glyphosate-dimethylammonium |
| A.116 | glyphosate-isopropylammonium |
| A.117 | glyphosate-trimesium (sulfosate) |
| A.118 | glyphosate-potassium |
| A.119 | glufosinate |
| A.120 | glufosinate-ammonium |
| A.121 | glufosinate-P |
| A.122 | glufosinate-P-ammonium |
| A.123 | pendimethalin |
| A.124 | trifluralin |
| A.125 | acetochlor |
| A.126 | butachlor |
| A.127 | cafenstrole |
| A.128 | dimethenamid-P |
| A.129 | fentrazamide |
| A.130 | flufenacet |
| A.131 | mefenacet |
| A.132 | metazachlor |
| A.133 | metolachlor |
| A.134 | S-metolachlor |
| A.135 | pretilachlor |
| A.136 | fenoxasulfone |
| A.137 | isoxaben |
| A.138 | ipfencarbazone |
| A.139 | pyroxasulfone |
| A.140 | 2,4-D |
| A.141 | 2,4-D-isobutyl |
| A.142 | 2,4-D-dimethylammonium |
| A.143 | 2,4-D-N,N,N-trimethylethanolammonium |
| A.144 | aminopyralid |
| A.145 | aminopyralid-methyl |
| A.146 | aminopyralid-dimethyl-ammonium |
| A.147 | aminopyralid-tris(2-hydroxypropyl)ammonium |
| A.148 | clopyralid |
| A.149 | clopyralid-methyl |
| A.150 | clopyralid-olamine |
| A.151 | dicamba |
| A.152 | dicamba-butotyl |
| A.153 | dicamba-diglycolamine |
| A.154 | dicamba-dimethylammonium |
| A.155 | dicamba-diolamine |
| A.156 | dicamba-isopropylammonium |
| A.157 | dicamba-potassium |
| A.158 | dicamba-sodium |
| A.159 | dicamba-trolamine |
| A.160 | dicamba-N,N-bis-(3-aminopropyl)methylamine |
| A.161 | dicamba-diethylenetriamine |
| A.162 | fluroxypyr |
| A.163 | fluroxypyr-meptyl |
| A.164 | MCPA |
| A.165 | MCPA-2-ethylhexyl |
| A.166 | MCPA-dimethylammonium |
| A.167 | quinclorac |
| A.168 | quinclorac-dimethylammonium |
| A.169 | quinmerac |
| A.170 | quinmerac-dimethylammonium |
| A.171 | aminocyclopyrachlor |
| A.172 | aminocyclopyrachlor-potassium |
| A.173 | aminocyclopyrachlor-methyl |
| A.174 | diflufenzopyr |
| A.175 | diflufenzopyr-sodium |
| A.176 | dymron |
| A.177 | indanofan |
| A.178 | indaziflam |
| A.179 | oxaziclomefone |
| A.180 | triaziflam |
| A.181 | II.1 |
| A.182 | II.2 |
| A.183 | II.3 |
| A.184 | II.4 |
| A.185 | II.5 |
| A.186 | II.6 |
| A.187 | II.7 |
| A.188 | II.8 |
| A.189 | II.9 |

[0455] Moreover, it may be useful to apply the phenylpyridines of formula (I) in combination with safeners. Safeners are chemical compounds which prevent or reduce damage on useful plants without having a major impact on the herbicidal action of the phenylpyridines of the formula (I) towards unwanted plants. They can be applied either before sowings (e.g. on seed treatments, shoots or seedlings) or in the pre-emergence application or post-emergence application of the useful plant.

[0456] The safeners and the phenylpyridines of formula (I) and optionally the herbicides B can be applied simultaneously or in succession.

[0457] In another embodiment of the present invention the compositions according to the present invention comprise at least one phenylpyridine of formula (I) and at least one safener C (component C).

[0458] Suitable safeners are e.g. (quinolin-8-oxy)acetic acids, 1-phenyl-5-haloalkyl-1 H-1,2,4-triazol-3-carboxylic acids, 1-phenyl-4,5-dihydro-5-alkyl-1 H-pyrazol-3,5-dicarboxylic acids, 4,5-dihydro-5,5-diaryl-3-isoxazol carboxylic acids, dichloroacetamides, alpha-oximinophenylacetonitriles, acetophenonoximes, 4,6-dihalo-2-phenylpyrimidines, N-[[4-(aminocarbonyl)phenyl]sulfonyl]-2-benzoic amides, 1,8-naphthalic anhydride, 2-halo-4-(haloalkyl)-5-thiazol carboxylic acids, phosphorthiolates and N-alkyl-O-phenylcarbamates and their agriculturally acceptable salts and their agriculturally acceptable derivatives such amides, esters, and thioesters, provided they have an acid group.

[0459] Examples of preferred safeners C are benoxacor, cloquintocet, cyometrinil, cyprosulfamide, dichlormid, dicyclonon, dietholate, fenchlorazole, fenclorim, flurazole, fluxofenim, furilazole, isoxadifen, mefenpyr, mephenate, naphthalic anhydride, oxabetrinil, 4-(dichloroacetyl)-1-oxa-4-azaspiro[4.5]decane (MON4660, CAS 71526-07-3), 2,2,5-trimethyl-3-(dichloroacetyl)-1,3-oxazolidine (R-29148, CAS 52836-31-4) and N-(2-Methoxybenzoyl)-4-[(methylaminocarbonyl)amino]benzenesulfonamide (CAS 129531-12-0).

[0460] Particularly preferred safeners C, which, as component C, are constituent of the composition according to the invention are the safeners C as defined above; in particular the safeners C.1-C.17 listed below in table C:

TABLE C

| | Safener C |
|---|---|
| C.1 | benoxacor |
| C.2 | cloquintocet |
| C.3 | cloquintocet-mexyl |
| C.4 | cyprosulfamide |
| C.5 | dichlormid |
| C.6 | fenchlorazole |
| C.7 | fenchlorazole-ethyl |
| C.8 | fenclorim |
| C.9 | furilazole |
| C.10 | isoxadifen |
| C.11 | isoxadifen-ethyl |
| C.12 | mefenpyr |
| C.13 | mefenpyr-diethyl |
| C.14 | naphtalic acid anhydride |
| C.15 | 4-(dichloroacetyl)-1-oxa-4-azaspiro[4.5]decane (MON4660, CAS |
| | 71526-07-3) |
| C.16 | 2,2,5-trimethyl-3-(dichloroacetyl)-1,3-oxazolidine (R-29148, CAS |
| | 52836-31-4) |
| C.17 | N-(2-Methoxybenzoyl)-4-[(methylaminocarbonyl)amino]benzene- |
| | sulfonamide (CAS 129531-12-0) |

[0461] The active compounds B of groups b1) to b15) and the active compounds C are known herbicides and safeners, see, for example, The Compendium of Pesticide Common Names (http://www.alanwood.net/pesticides/); Farm Chemicals Handbook 2000 volume 86, Meister Publishing Company, 2000; B. Hock, C. Fedtke, R. R. Schmidt, Herbizide [Herbicides], Georg Thieme Verlag, Stuttgart 1995; W. H. Ahrens, Herbicide Handbook, 7th edition, Weed Science Society of America, 1994; and K. K. Hatzios, Herbicide Handbook, Supplement for the 7th edition, Weed Science Society of America, 1998. 2,2,5-Trimethyl-3-(dichloroacetyl)-1,3-oxazolidine [CAS No. 52836-31-4] is also referred to as R-29148. 4-(Dichloroacetyl)-1-oxa-4-azaspiro[4.5]decane [CAS No. 71526-07-3] is also referred to as AD-67 and MON 4660.

[0462] The assignment of the active compounds to the respective mechanisms of action is based on current knowledge. If several mechanisms of action apply to one active compound, this substance was only assigned to one mechanism of action.

[0463] According to a preferred embodiment of the invention, the composition comprises as herbicidal active compound B or component B at least one, preferably exactly one herbicide B.

[0464] According to another preferred embodiment of the invention, the composition comprises as herbicidal active compounds B or component B at least two, preferably exactly two herbicides B different from each other.

[0465] According to another preferred embodiment of the invention, the composition comprises as herbicidal active compounds B or component B at least three, preferably exactly three herbicides B different from each other.

[0466] According to another preferred embodiment of the invention, the composition comprises as herbicidal active compounds B or component B at least four, preferably exactly four herbicides B different from each other.

[0467] According to another preferred embodiment of the invention, the composition comprises as safening component C or component C at least one, preferably exactly one safener C.

[0468] According to another preferred embodiment of the invention, the composition comprises as component B at least one, preferably exactly one herbicide B, and as component C at least one, preferably exactly one, safener C.

[0469] According to another preferred embodiment of the invention, the composition comprises at least two, preferably exactly two, herbicides B different from each other, and as component C at least one, preferably exactly one, safener C.

[0470] According to another preferred embodiment of the invention, the composition comprises at least three, preferably exactly three, herbicides B different from each other, and as component C at least one, preferably exactly one, safener C.

[0471] According to another preferred embodiment of the invention, the composition comprises as component A at least one, preferably exactly one compound of formula (I), preferably of formula (I.a), especially preferred the compound (I.a.200), and as component B at least one, preferably exactly one, herbicide B.

[0472] According to another preferred embodiment of the invention, the composition comprises as component A at least one, preferably exactly one compound of formula (I), preferably of formula (I.a), especially preferred the compound (I.a.200), and at least two, preferably exactly two, herbicides B different from each other.

[0473] According to another preferred embodiment of the invention, the composition comprises as component A at least one, preferably exactly one compound of formula (I), preferably of formula (I.a), especially preferred the compound (I.a.200), and at least three, preferably exactly three, herbicides B different from each other.

[0474] According to another preferred embodiment of the invention, the composition comprises as component A at least one, preferably exactly one compound of formula (I), preferably of formula (I.a), especially preferred the compound (I.a.200), and at least four, preferably exactly four, herbicides B different from each other.

[0475] According to another preferred embodiment of the invention, the composition comprises as component A at least one, preferably exactly one one compound of formula (I), preferably of formula (I.a), especially preferred the compound (I.a.200), and as component C at least one, preferably exactly one, safener C.

[0476] According to another preferred embodiment of the invention, the composition comprises as component A at least one, preferably exactly one compound of formula (I), preferably of formula (I.a), especially preferred the compound (I.a.200), as component B at least one, preferably exactly one, herbicide B, and as component C at least one, preferably exactly one safener C.

[0477] According to another preferred embodiment of the invention, the composition comprises as component A at least one, preferably exactly one compound of formula (I), preferably of formula (I.a), especially preferred the compound (I.a.200), at least two, preferably exactly two herbicides B different from each other, and as component C at least one, preferably exactly one, safener C.

[0478] According to another preferred embodiment of the invention, the composition comprises as component A at least one, preferably exactly one compound of formula (I), preferably of formula (I.a), especially preferred the compound (I.a.200), at least three, preferably exactly three herbicides B different from each other, and as component C at least one, preferably exactly one, safener C.

[0479] According to another preferred embodiment of the invention, the composition comprises, in addition to a phenylpyridine of formula (I), especially an active compound from the group consisting of (I.a.200), (I.a.207), (I.a.214), (I.a.228) and (I.a.234), at least one and especially exactly one herbicidally active compound from group b4), in particular selected from the group consisting of flumioxazin, oxyfluorfen, saflufenacil, sulfentrazone, ethyl [3-[2-chloro-4-fluoro-5-(1-methyl-6-trifluoromethyl-2,4-dioxo-1,2,3,4-tetrahydropyrimidin-3-yl)phenoxy]-2-pyridyloxy]acetate (CAS 353292-31-6; S-3100, 3-[7-fluoro-3-oxo-4-(prop-2-ynyl)-3,4-dihydro-2H-benzo[1,4]oxazin-6-yl]-1,5-dimethyl-6-thioxo-[1,3,5]triazinan-2,4-dione, 1,5-dimethyl-6-thioxo-3-(2,2,7-trifluoro-3-oxo-4-(prop-2-ynyl)-3,4-dihydro-2H-benzo[b][1,4]oxazin-6-yl)-1,3,5-triazinane-2,4-dione (CAS 1258836-72-4), 2-(2,2,7-Trifluoro-3-oxo-4-prop-2-ynyl-3,4-dihydro-2H-benzo[1,4]oxazin-6-yl)-4,5,6,7-tetrahydro-isoindole-1,3-dione and 1-methyl-6-trifluoromethyl-3-(2,2,7-trifluoro-3-oxo-4-prop-2-ynyl-3,4-dihydro-2H-benzo[1,4]oxazin-6-yl)-1 H-pyrimidine-2,4-dione.

[0480] According to another preferred embodiment of the invention, the composition comprises, in addition to a phenylpyridine of formula (I), especially an active compound from the group consisting of (I.a.200), (I.a.207), (I.a.214), (I.a.228) and (I.a.234), at least one and especially exactly one herbicidally active compound from group b6), in particular selected from the group consisting of glyphosate, glyphosate-isopropylammonium and glyphosate-trimesium (sulfosate).

[0481] According to another preferred embodiment of the invention, the composition comprises, in addition to a phenylpyridine of formula (I), especially an active compound from the group consisting of (I.a.200), (I.a.207), (I.a.214), (I.a.228) and (I.a.234), at least one and especially exactly one herbicidally active compound from group b7), in particular selected from the group consisting of glufosinate, glufosinate-P and glufosinate-ammonium.

[0482] According to another preferred embodiment of the invention, the composition comprises, in addition to a phenylpyridine of formula (I), especially an active compound from the group consisting of (I.a.200), (I.a.207), (I.a.214), (I.a.228) and (I.a.234), at least one and especially exactly one herbicidally active compound from group b10), in particular selected from the group consisting of acetochlor, cafenstrole, dimethenamid-P, fentrazamide, flufenacet, mefenacet, metazachlor, metolachlor, S-metolachlor, fenoxasulfone and pyroxasulfone. Likewise, preference is given to compositions comprising in addition to a phenylpyridine of formula (I), especially an active compound from the group consisting of (I.a.200), (I.a.207), (I.a.214), (I.a.228) and (I.a.234), at least one and especially exactly one herbicidally active compound from group b10), in particular selected from the group consisting of isoxazoline compounds of the formulae II.1, II.2, II.3, II.4, II.5, II.6, II.7, II.8 and II.9, as defined above.

[0483] According to another preferred embodiment of the invention, the composition comprises, in addition to a phenylpyridine of formula (I), especially an active compound from the group consisting of (I.a.200), (I.a.207), (I.a.214), (I.a.228) and (I.a.234), at least one and especially exactly one herbicidally active compound from group b13), in particular selected from the group consisting of 2,4-D and its salts and esters, aminocyclopyrachlor and its salts and esters, aminopyralid and its salts such as aminopyralid-dimethylammonium, aminopyralid-tris(2-hydroxypropyl)ammonium and its esters, clopyralid and its salts and esters, dicamba and its salts and esters, fluroxypyr-meptyl, quinclorac and quinmerac.

[0484] Here and below, the term “binary compositions” includes compositions comprising one or more, for example 1, 2 or 3, active compounds of the formula (I) and either one or more, for example 1, 2 or 3, herbicides B or one or more safeners C.

[0485] Correspondingly, the term “ternary compositions” includes compositions comprising one or more, for example 1, 2 or 3, active compounds of the formula (I), one or more, for example 1, 2 or 3, herbicides B and one or more, for example 1, 2 or 3, safeners C.

[0486] In binary compositions comprising at least one compound of the formula (I) as component A and at least one herbicide B, the weight ratio of the active compounds A:B is generally in the range of from 1:1000 to 1000:1, preferably in the range of from 1:500 to 500:1, in particular in the range of from 1:250 to 250:1 and particularly preferably in the range of from 1:75 to 75:1.

[0487] In binary compositions comprising at least one compound of the formula (I) as component A and at least one safener C, the weight ratio of the active compounds A:C is generally in the range of from 1:1000 to 1000:1, preferably in the range of from 1:500 to 500:1, in particular in the range of from 1:250 to 250:1 and particularly preferably in the range of from 1:75 to 75:1.

[0488] In ternary compositions comprising at least one phenylpyridine of formula (I) as component A, at least one herbicide B and at least one safener C, the relative proportions by weight of the components A:B are generally in the range of from 1:1000 to 1000:1, preferably in the range of from 1:500 to 500:1, in particular in the range of from 1:250 to 250:1 and particularly preferably in the range of from 1:75 to 75:1, the weight ratio of the components A:C is generally in the range of from 1:1000 to 1000:1, preferably in the range of from 1:500 to 500:1, in particular in the range of from 1:250 to 250:1 and particularly preferably in the range of from 1:75 to 75:1, and the weight ratio of the components B:C is generally in the range of from 1:1000 to 1000:1, preferably in the range of from 1:500 to 500:1, in particular in the range of from 1:250 to 250:1 and particularly preferably in the range of from 1:75 to 75:1. The weight ratio of components A+B to component C is preferably in the range of from 1:500 to 500:1, in particular in the range of from 1:250 to 250:1 and particularly preferably in the range of from 1:75 to 75:1.

[0489] The weight ratios of the individual components in the preferred mixtures mentioned below are within the limits given herein, in particular within the preferred limits.

[0490] Particularly preferred are the compositions mentioned below comprising the phenylpyridines of formula (I) as defined and the substance(s) as defined in the respective row of table 1;

[0491] especially preferred comprising as only herbicidal active compounds the phenylpyridines of formula (I) as defined and the substance(s) as defined in the respective row of table 1;

[0492] most preferably comprising as only active compounds the phenylpyridines of formula (I) as defined and the substance(s) as defined in the respective row of table 1.

[0493] Particularly preferred are compositions 1.1 to 1.3419, comprising the phenylpyridine of formula (I.a.200) and the substance(s) as defined in the respective row of table 1:

TABLE 1
(compositions 1.1 to 1.3419):

| comp. | herbicide | safener |
|---|---|---|
| no. | B | C |
| 1.1 | B.1 | — |
| 1.2 | B.2 | — |
| 1.3 | B.3 | — |
| 1.4 | B.4 | — |
| 1.5 | B.5 | — |
| 1.6 | B.6 | — |
| 1.7 | B.7 | — |
| 1.8 | B.8 | — |
| 1.9 | B.9 | — |
| 1.10 | B.10 | — |
| 1.11 | B.11 | — |
| 1.12 | B.12 | — |
| 1.13 | B.13 | — |
| 1.14 | B.14 | — |
| 1.15 | B.15 | — |
| 1.16 | B.16 | — |
| 1.17 | B.17 | — |
| 1.18 | B.18 | — |
| 1.19 | B.19 | — |
| 1.20 | B.20 | — |
| 1.21 | B.21 | — |
| 1.22 | B.22 | — |
| 1.23 | B.23 | — |
| 1.24 | B.24 | — |
| 1.25 | B.25 | — |
| 1.26 | B.26 | — |
| 1.27 | B.27 | — |
| 1.28 | B.28 | — |
| 1.29 | B.29 | — |
| 1.30 | B.30 | — |
| 1.31 | B.31 | — |
| 1.32 | B.32 | — |
| 1.33 | B.33 | — |
| 1.34 | B.34 | — |
| 1.35 | B.35 | — |
| 1.36 | B.36 | — |
| 1.37 | B.37 | — |
| 1.38 | B.38 | — |
| 1.39 | B.39 | — |
| 1.40 | B.40 | — |
| 1.41 | B.41 | — |
| 1.42 | B.42 | — |
| 1.43 | B.43 | — |
| 1.44 | B.44 | — |
| 1.45 | B.45 | — |
| 1.46 | B.46 | — |
| 1.47 | B.47 | — |
| 1.48 | B.48 | — |
| 1.49 | B.49 | — |
| 1.50 | B.50 | — |
| 1.51 | B.51 | — |
| 1.52 | B.52 | — |
| 1.53 | B.53 | — |
| 1.54 | B.54 | — |
| 1.55 | B.55 | — |
| 1.56 | B.56 | — |
| 1.57 | B.57 | — |
| 1.58 | B.58 | — |
| 1.59 | B.59 | — |
| 1.60 | B.60 | — |
| 1.61 | B.61 | — |
| 1.62 | B.62 | — |
| 1.63 | B.63 | — |
| 1.64 | B.64 | — |
| 1.65 | B.65 | — |
| 1.66 | B.66 | — |
| 1.67 | B.67 | — |
| 1.68 | B.68 | — |
| 1.69 | B.69 | — |
| 1.70 | B.70 | — |
| 1.71 | B.71 | — |
| 1.72 | B.72 | — |
| 1.73 | B.73 | — |
| 1.74 | B.74 | — |
| 1.75 | B.75 | — |
| 1.76 | B.76 | — |
| 1.77 | B.77 | — |
| 1.78 | B.78 | — |
| 1.79 | B.79 | — |
| 1.80 | B.80 | — |
| 1.81 | B.81 | — |
| 1.82 | B.82 | — |
| 1.83 | B.83 | — |
| 1.84 | B.84 | — |
| 1.85 | B.85 | — |
| 1.86 | B.86 | — |
| 1.87 | B.87 | — |
| 1.88 | B.88 | — |
| 1.89 | B.89 | — |
| 1.90 | B.90 | — |
| 1.91 | B.91 | — |
| 1.92 | B.92 | — |
| 1.93 | B.93 | — |
| 1.94 | B.94 | — |
| 1.95 | B.95 | — |
| 1.96 | B.96 | — |
| 1.97 | B.97 | — |
| 1.98 | B.98 | — |
| 1.99 | B.99 | — |
| 1.100 | B.100 | — |
| 1.101 | B.101 | — |
| 1.102 | B.102 | — |
| 1.103 | B.103 | — |
| 1.104 | B.104 | — |
| 1.105 | B.105 | — |
| 1.106 | B.106 | — |
| 1.107 | B.107 | — |
| 1.108 | B.108 | — |
| 1.109 | B.109 | — |
| 1.110 | B.110 | — |
| 1.111 | B.111 | — |
| 1.112 | B.112 | — |
| 1.113 | B.113 | — |
| 1.114 | B.114 | — |
| 1.115 | B.115 | — |
| 1.116 | B.116 | — |
| 1.117 | B.117 | — |
| 1.118 | B.118 | — |
| 1.119 | B.119 | — |
| 1.120 | B.120 | — |
| 1.121 | B.121 | — |
| 1.122 | B.122 | — |
| 1.123 | B.123 | — |
| 1.124 | B.124 | — |
| 1.125 | B.125 | — |
| 1.126 | B.126 | — |
| 1.127 | B.127 | — |
| 1.128 | B.128 | — |
| 1.129 | B.129 | — |
| 1.130 | B.130 | — |
| 1.131 | B.131 | — |
| 1.132 | B.132 | — |
| 1.133 | B.133 | — |
| 1.134 | B.134 | — |
| 1.135 | B.135 | — |
| 1.136 | B.136 | — |
| 1.137 | B.137 | — |
| 1.138 | B.138 | — |
| 1.139 | B.139 | — |
| 1.140 | B.140 | — |
| 1.141 | B.141 | — |
| 1.142 | B.142 | — |
| 1.143 | B.143 | — |
| 1.144 | B.144 | — |
| 1.145 | B.145 | — |
| 1.146 | B.146 | — |
| 1.147 | B.147 | — |
| 1.148 | B.148 | — |
| 1.149 | B.149 | — |
| 1.150 | B.150 | — |
| 1.151 | B.151 | — |
| 1.152 | B.152 | — |
| 1.153 | B.153 | — |
| 1.154 | B.154 | — |
| 1.155 | B.155 | — |
| 1.156 | B.156 | — |
| 1.157 | B.157 | — |
| 1.158 | B.158 | — |
| 1.159 | B.159 | — |
| 1.160 | B.160 | — |
| 1.161 | B.161 | — |
| 1.162 | B.162 | — |
| 1.163 | B.163 | — |
| 1.164 | B.164 | — |
| 1.165 | B.165 | — |
| 1.166 | B.166 | — |
| 1.167 | B.167 | — |
| 1.169 | B.169 | — |
| 1.170 | B.170 | — |
| 1.171 | B.171 | — |
| 1.172 | B.172 | — |
| 1.173 | B.173 | — |
| 1.174 | B.174 | — |
| 1.175 | B.175 | — |
| 1.176 | B.176 | — |
| 1.177 | B.177 | — |
| 1.178 | B.178 | — |
| 1.179 | B.179 | — |
| 1.180 | B.180 | — |
| 1.181 | B.181 | — |
| 1.182 | B.182 | — |
| 1.183 | B.183 | — |
| 1.184 | B.184 | — |
| 1.185 | B.185 | — |
| 1.186 | B.186 | — |
| 1.187 | B.187 | — |
| 1.188 | B.188 | — |
| 1.189 | B.189 | — |
| 1.190 | B.1 | C.1 |
| 1.191 | B.2 | C.1 |
| 1.192 | B.3 | C.1 |
| 1.193 | B.4 | C.1 |
| 1.194 | B.5 | C.1 |
| 1.195 | B.6 | C.1 |
| 1.196 | B.7 | C.1 |
| 1.197 | B.8 | C.1 |
| 1.198 | B.9 | C.1 |
| 1.199 | B.10 | C.1 |
| 1.200 | B.11 | C.1 |
| 1.201 | B.12 | C.1 |
| 1.202 | B.13 | C.1 |
| 1.203 | B.14 | C.1 |
| 1.204 | B.15 | C.1 |
| 1.205 | B.16 | C.1 |
| 1.206 | B.17 | C.1 |
| 1.207 | B.18 | C.1 |
| 1.208 | B.19 | C.1 |
| 1.209 | B.20 | C.1 |
| 1.210 | B.21 | C.1 |
| 1.211 | B.22 | C.1 |
| 1.212 | B.23 | C.1 |
| 1.213 | B.24 | C.1 |
| 1.214 | B.25 | C.1 |
| 1.215 | B.26 | C.1 |
| 1.216 | B.27 | C.1 |
| 1.217 | B.28 | C.1 |
| 1.218 | B.29 | C.1 |
| 1.219 | B.30 | C.1 |
| 1.220 | B.31 | C.1 |
| 1.221 | B.32 | C.1 |
| 1.222 | B.33 | C.1 |
| 1.223 | B.34 | C.1 |
| 1.224 | B.35 | C.1 |
| 1.225 | B.36 | C.1 |
| 1.226 | B.37 | C.1 |
| 1.227 | B.38 | C.1 |
| 1.228 | B.39 | C.1 |
| 1.229 | B.40 | C.1 |
| 1.230 | B.41 | C.1 |
| 1.231 | B.42 | C.1 |
| 1.232 | B.43 | C.1 |
| 1.233 | B.44 | C.1 |
| 1.234 | B.45 | C.1 |
| 1.235 | B.46 | C.1 |
| 1.236 | B.47 | C.1 |
| 1.237 | B.48 | C.1 |
| 1.238 | B.49 | C.1 |
| 1.239 | B.50 | C.1 |
| 1.240 | B.51 | C.1 |
| 1.241 | B.52 | C.1 |
| 1.242 | B.53 | C.1 |
| 1.243 | B.54 | C.1 |
| 1.244 | B.55 | C.1 |
| 1.245 | B.56 | C.1 |
| 1.246 | B.57 | C.1 |
| 1.247 | B.58. | C.1 |
| 1.248 | B.59 | C.1 |
| 1.249 | B.60 | C.1 |
| 1.250 | B.61 | C.1 |
| 1.251 | B.62 | C.1 |
| 1.252 | B.63 | C.1 |
| 1.253 | B.64 | C.1 |
| 1.254 | B.65 | C.1 |
| 1.255 | B.66 | C.1 |
| 1.256 | B.67 | C.1 |
| 1.257 | B.68 | C.1 |
| 1.258 | B.69 | C.1 |
| 1.259 | B.70 | C.1 |
| 1.260 | B.71 | C.1 |
| 1.261 | B.72 | C.1 |
| 1.262 | B.73 | C.1 |
| 1.263 | B.74 | C.1 |
| 1.264 | B.75 | C.1 |
| 1.265 | B.76 | C.1 |
| 1.266 | B.77 | C.1 |
| 1.267 | B.78 | C.1 |
| 1.268 | B.79 | C.1 |
| 1.269 | B.80 | C.1 |
| 1.270 | B.81 | C.1 |
| 1.271 | B.82 | C.1 |
| 1.272 | B.83 | C.1 |
| 1.273 | B.84 | C.1 |
| 1.274 | B.85 | C.1 |
| 1.275 | B.86 | C.1 |
| 1.276 | B.87 | C.1 |
| 1.277 | B.88 | C.1 |
| 1.278 | B.89 | C.1 |
| 1.279 | B.90 | C.1 |
| 1.280 | B.91 | C.1 |
| 1.281 | B.92 | C.1 |
| 1.282 | B.93 | C.1 |
| 1.283 | B.94 | C.1 |
| 1.284 | B.95 | C.1 |
| 1.285 | B.96 | C.1 |
| 1.286 | B.97 | C.1 |
| 1.287 | B.98 | C.1 |
| 1.288 | B.99 | C.1 |
| 1.289 | B.100 | C.1 |
| 1.290 | B.101 | C.1 |
| 1.291 | B.102 | C.1 |
| 1.292 | B.103 | C.1 |
| 1.293 | B.104 | C.1 |
| 1.294 | B.105 | C.1 |
| 1.295 | B.106 | C.1 |
| 1.296 | B.107 | C.1 |
| 1.297 | B.108 | C.1 |
| 1.298 | B.109 | C.1 |
| 1.299 | B.110 | C.1 |
| 1.300 | B.111 | C.1 |
| 1.301 | B.112 | C.1 |
| 1.302 | B.113 | C.1 |
| 1.303 | B.114 | C.1 |
| 1.304 | B.115 | C.1 |
| 1.305 | B.116 | C.1 |
| 1.306 | B.117 | C.1 |
| 1.307 | B.118 | C.1 |
| 1.308 | B.119 | C.1 |
| 1.309 | B.120 | C.1 |
| 1.310 | B.121 | C.1 |
| 1.311 | B.122 | C.1 |
| 1.312 | B.123 | C.1 |
| 1.313 | B.124 | C.1 |
| 1.314 | B.125 | C.1 |
| 1.315 | B.126 | C.1 |
| 1.316 | B.127 | C.1 |
| 1.317 | B.128 | C.1 |
| 1.318 | B.129 | C.1 |
| 1.319 | B.130 | C.1 |
| 1.320 | B.131 | C.1 |
| 1.321 | B.132 | C.1 |
| 1.322 | B.133 | C.1 |
| 1.323 | B.134 | C.1 |
| 1.324 | B.135 | C.1 |
| 1.325 | B.136 | C.1 |
| 1.326 | B.137 | C.1 |
| 1.327 | B.138 | C.1 |
| 1.328 | B.139 | C.1 |
| 1.329 | B.140 | C.1 |
| 1.330 | B.141 | C.1 |
| 1.331 | B.142 | C.1 |
| 1.332 | B.143 | C.1 |
| 1.333 | B.144 | C.1 |
| 1.334 | B.145 | C.1 |
| 1.335 | B.146 | C.1 |
| 1.336 | B.147 | C.1 |
| 1.337 | B.148 | C.1 |
| 1.338 | B.149 | C.1 |
| 1.339 | B.150 | C.1 |
| 1.340 | B.151 | C.1 |
| 1.341 | B.152 | C.1 |
| 1.342 | B.153 | C.1 |
| 1.343 | B.154 | C.1 |
| 1.344 | B.155 | C.1 |
| 1.345 | B.156 | C.1 |
| 1.346 | B.157 | C.1 |
| 1.347 | B.158 | C.1 |
| 1.348 | B.159 | C.1 |
| 1.349 | B.160 | C.1 |
| 1.350 | B.161 | C.1 |
| 1.351 | B.162 | C.1 |
| 1.352 | B.163 | C.1 |
| 1.353 | B.164 | C.1 |
| 1.354 | B.165 | C.1 |
| 1.355 | B.166 | C.1 |
| 1.356 | B.167 | C.1 |
| 1.357 | B.168 | C.1 |
| 1.358 | B.169 | C.1 |
| 1.359 | B.170 | C.1 |
| 1.360 | B.171 | C.1 |
| 1.361 | B.172 | C.1 |
| 1.362 | B.173 | C.1 |
| 1.363 | B.174 | C.1 |
| 1.364 | B.175 | C.1 |
| 1.365 | B.176 | C.1 |
| 1.366 | B.177 | C.1 |
| 1.367 | B.178 | C.1 |
| 1.368 | B.179 | C.1 |
| 1.369 | B.180 | C.1 |
| 1.370 | B.181 | C.1 |
| 1.371 | B.182 | C.1 |
| 1.372 | B.183 | C.1 |
| 1.373 | B.184 | C.1 |
| 1.374 | B.185 | C.1 |
| 1.375 | B.186 | C.1 |
| 1.376 | B.187 | C.1 |
| 1.377 | B.188 | C.1 |
| 1.378 | B.189 | C.1 |
| 1.379 | B.1 | C.2 |
| 1.380 | B.2 | C.2 |
| 1.381 | B.3 | C.2 |
| 1.382 | B.4 | C.2 |
| 1.383 | B.5 | C.2 |
| 1.384 | B.6 | C.2 |
| 1.385 | B.7 | C.2 |
| 1.386 | B.8 | C.2 |
| 1.387 | B.9 | C.2 |
| 1.388 | B.10 | C.2 |
| 1.389 | B.11 | C.2 |
| 1.390 | B.12 | C.2 |
| 1.391 | B.13 | C.2 |
| 1.392 | B.14 | C.2 |
| 1.393 | B.15 | C.2 |
| 1.394 | B.16 | C.2 |
| 1.395 | B.17 | C.2 |
| 1.396 | B.18 | C.2 |
| 1.397 | B.19 | C.2 |
| 1.398 | B.20 | C.2 |
| 1.399 | B.21 | C.2 |
| 1.400 | B.22 | C.2 |
| 1.401 | B.23 | C.2 |
| 1.402 | B.24 | C.2 |
| 1.403 | B.25 | C.2 |
| 1.404 | B.26 | C.2 |
| 1.405 | B.27 | C.2 |
| 1.406 | B.28 | C.2 |
| 1.407 | B.29 | C.2 |
| 1.408 | B.30 | C.2 |
| 1.409 | B.31 | C.2 |
| 1.410 | B.32 | C.2 |
| 1.411 | B.33 | C.2 |
| 1.412 | B.34 | C.2 |
| 1.413 | B.35 | C.2 |
| 1.414 | B.36 | C.2 |
| 1.415 | B.37 | C.2 |
| 1.416 | B.38 | C.2 |
| 1.417 | B.39 | C.2 |
| 1.418 | B.40 | C.2 |
| 1.419 | B.41 | C.2 |
| 1.420 | B.42 | C.2 |
| 1.421 | B.43 | C.2 |
| 1.422 | B.44 | C.2 |
| 1.423 | B.45 | C.2 |
| 1.424 | B.46 | C.2 |
| 1.425 | B.47 | C.2 |
| 1.426 | B.48 | C.2 |
| 1.427 | B.49 | C.2 |
| 1.428 | B.50 | C.2 |
| 1.429 | B.51 | C.2 |
| 1.430 | B.52 | C.2 |
| 1.431 | B.53 | C.2 |
| 1.432 | B.54 | C.2 |
| 1.433 | B.55 | C.2 |
| 1.434 | B.56 | C.2 |
| 1.435 | B.57 | C.2 |
| 1.436 | B.58. | C.2 |
| 1.437 | B.59 | C.2 |
| 1.438 | B.60 | C.2 |
| 1.439 | B.61 | C.2 |
| 1.440 | B.62 | C.2 |
| 1.441 | B.63 | C.2 |
| 1.442 | B.64 | C.2 |
| 1.443 | B.65 | C.2 |
| 1.444 | B.66 | C.2 |
| 1.445 | B.67 | C.2 |
| 1.446 | B.68 | C.2 |
| 1.447 | B.69 | C.2 |
| 1.448 | B.70 | C.2 |
| 1.449 | B.71 | C.2 |
| 1.450 | B.72 | C.2 |
| 1.451 | B.73 | C.2 |
| 1.452 | B.74 | C.2 |
| 1.453 | B.75 | C.2 |
| 1.454 | B.76 | C.2 |
| 1.455 | B.77 | C.2 |
| 1.456 | B.78 | C.2 |
| 1.457 | B.79 | C.2 |
| 1.458 | B.80 | C.2 |
| 1.459 | B.81 | C.2 |
| 1.460 | B.82 | C.2 |
| 1.461 | B.83 | C.2 |
| 1.462 | B.84 | C.2 |
| 1.463 | B.85 | C.2 |
| 1.464 | B.86 | C.2 |
| 1.465 | B.87 | C.2 |
| 1.466 | B.88 | C.2 |
| 1.467 | B.89 | C.2 |
| 1.468 | B.90 | C.2 |
| 1.469 | B.91 | C.2 |
| 1.470 | B.92 | C.2 |
| 1.471 | B.93 | C.2 |
| 1.472 | B.94 | C.2 |
| 1.473 | B.95 | C.2 |
| 1.474 | B.96 | C.2 |
| 1.475 | B.97 | C.2 |
| 1.476 | B.98 | C.2 |
| 1.477 | B.99 | C.2 |
| 1.478 | B.100 | C.2 |
| 1.479 | B.101 | C.2 |
| 1.480 | B.102 | C.2 |
| 1.481 | B.103 | C.2 |
| 1.482 | B.104 | C.2 |
| 1.483 | B.105 | C.2 |
| 1.484 | B.106 | C.2 |
| 1.485 | B.107 | C.2 |
| 1.486 | B.108 | C.2 |
| 1.487 | B.109 | C.2 |
| 1.488 | B.110 | C.2 |
| 1.489 | B.111 | C.2 |
| 1.490 | B.112 | C.2 |
| 1.491 | B.113 | C.2 |
| 1.492 | B.114 | C.2 |
| 1.493 | B.115 | C.2 |
| 1.494 | B.116 | C.2 |
| 1.495 | B.117 | C.2 |
| 1.496 | B.118 | C.2 |
| 1.497 | B.119 | C.2 |
| 1.498 | B.120 | C.2 |
| 1.499 | B.121 | C.2 |
| 1.500 | B.122 | C.2 |
| 1.501 | B.123 | C.2 |
| 1.502 | B.124 | C.2 |
| 1.503 | B.125 | C.2 |
| 1.504 | B.126 | C.2 |
| 1.505 | B.127 | C.2 |
| 1.506 | B.128 | C.2 |
| 1.507 | B.129 | C.2 |
| 1.508 | B.130 | C.2 |
| 1.509 | B.131 | C.2 |
| 1.510 | B.132 | C.2 |
| 1.511 | B.133 | C.2 |
| 1.512 | B.134 | C.2 |
| 1.513 | B.135 | C.2 |
| 1.514 | B.136 | C.2 |
| 1.515 | B.137 | C.2 |
| 1.516 | B.138 | C.2 |
| 1.517 | B.139 | C.2 |
| 1.518 | B.140 | C.2 |
| 1.519 | B.141 | C.2 |
| 1.520 | B.142 | C.2 |
| 1.521 | B.143 | C.2 |
| 1.522 | B.144 | C.2 |
| 1.523 | B.145 | C.2 |
| 1.524 | B.146 | C.2 |
| 1.525 | B.147 | C.2 |
| 1.526 | B.148 | C.2 |
| 1.527 | B.149 | C.2 |
| 1.528 | B.150 | C.2 |
| 1.529 | B.151 | C.2 |
| 1.530 | B.152 | C.2 |
| 1.531 | B.153 | C.2 |
| 1.532 | B.154 | C.2 |
| 1.533 | B.155 | C.2 |
| 1.534 | B.156 | C.2 |
| 1.535 | B.157 | C.2 |
| 1.536 | B.158 | C.2 |
| 1.537 | B.159 | C.2 |
| 1.538 | B.160 | C.2 |
| 1.539 | B.161 | C.2 |
| 1.540 | B.162 | C.2 |
| 1.541 | B.163 | C.2 |
| 1.542 | B.164 | C.2 |
| 1.543 | B.165 | C.2 |
| 1.544 | B.166 | C.2 |
| 1.545 | B.167 | C.2 |
| 1.546 | B.168 | C.2 |
| 1.547 | B.169 | C.2 |
| 1.548 | B.170 | C.2 |
| 1.549 | B.171 | C.2 |
| 1.550 | B.172 | C.2 |
| 1.551 | B.173 | C.2 |
| 1.552 | B.174 | C.2 |
| 1.553 | B.175 | C.2 |
| 1.554 | B.176 | C.2 |
| 1.555 | B.177 | C.2 |
| 1.556 | B.178 | C.2 |
| 1.557 | B.179 | C.2 |
| 1.558 | B.180 | C.2 |
| 1.559 | B.181 | C.2 |
| 1.560 | B.182 | C.2 |
| 1.561 | B.183 | C.2 |
| 1.562 | B.184 | C.2 |
| 1.563 | B.185 | C.2 |
| 1.564 | B.186 | C.2 |
| 1.565 | B.187 | C.2 |
| 1.566 | B.188 | C.2 |
| 1.567 | B.189 | C.2 |
| 1.568 | B.1 | C.3 |
| 1.569 | B.2 | C.3 |
| 1.570 | B.3 | C.3 |
| 1.571 | B.4 | C.3 |
| 1.572 | B.5 | C.3 |
| 1.573 | B.6 | C.3 |
| 1.574 | B.7 | C.3 |
| 1.575 | B.8 | C.3 |
| 1.576 | B.9 | C.3 |
| 1.577 | B.10 | C.3 |
| 1.578 | B.11 | C.3 |
| 1.579 | B.12 | C.3 |
| 1.580 | B.13 | C.3 |
| 1.581 | B.14 | C.3 |
| 1.582 | B.15 | C.3 |
| 1.583 | B.16 | C.3 |
| 1.584 | B.17 | C.3 |
| 1.585 | B.18 | C.3 |
| 1.586 | B.19 | C.3 |
| 1.587 | B.20 | C.3 |
| 1.588 | B.21 | C.3 |
| 1.589 | B.22 | C.3 |
| 1.590 | B.23 | C.3 |
| 1.591 | B.24 | C.3 |
| 1.592 | B.25 | C.3 |
| 1.593 | B.26 | C.3 |
| 1.594 | B.27 | C.3 |
| 1.595 | B.28 | C.3 |
| 1.596 | B.29 | C.3 |
| 1.597 | B.30 | C.3 |
| 1.598 | B.31 | C.3 |
| 1.599 | B.32 | C.3 |
| 1.600 | B.33 | C.3 |
| 1.601 | B.34 | C.3 |
| 1.602 | B.35 | C.3 |
| 1.603 | B.36 | C.3 |
| 1.604 | B.37 | C.3 |
| 1.605 | B.38 | C.3 |
| 1.606 | B.39 | C.3 |
| 1.607 | B.40 | C.3 |
| 1.608 | B.41 | C.3 |
| 1.609 | B.42 | C.3 |
| 1.610 | B.43 | C.3 |
| 1.611 | B.44 | C.3 |
| 1.612 | B.45 | C.3 |
| 1.613 | B.46 | C.3 |
| 1.614 | B.47 | C.3 |
| 1.615 | B.48 | C.3 |
| 1.616 | B.49 | C.3 |
| 1.617 | B.50 | C.3 |
| 1.618 | B.51 | C.3 |
| 1.619 | B.52 | C.3 |
| 1.620 | B.53 | C.3 |
| 1.621 | B.54 | C.3 |
| 1.622 | B.55 | C.3 |
| 1.623 | B.56 | C.3 |
| 1.624 | B.57 | C.3 |
| 1.625 | B.58. | C.3 |
| 1.626 | B.59 | C.3 |
| 1.627 | B.60 | C.3 |
| 1.628 | B.61 | C.3 |
| 1.629 | B.62 | C.3 |
| 1.630 | B.63 | C.3 |
| 1.631 | B.64 | C.3 |
| 1.632 | B.65 | C.3 |
| 1.633 | B.66 | C.3 |
| 1.634 | B.67 | C.3 |
| 1.635 | B.68 | C.3 |
| 1.636 | B.69 | C.3 |
| 1.637 | B.70 | C.3 |
| 1.638 | B.71 | C.3 |
| 1.639 | B.72 | C.3 |
| 1.640 | B.73 | C.3 |
| 1.641 | B.74 | C.3 |
| 1.642 | B.75 | C.3 |
| 1.643 | B.76 | C.3 |
| 1.644 | B.77 | C.3 |
| 1.645 | B.78 | C.3 |
| 1.646 | B.79 | C.3 |
| 1.647 | B.80 | C.3 |
| 1.648 | B.81 | C.3 |
| 1.649 | B.82 | C.3 |
| 1.650 | B.83 | C.3 |
| 1.651 | B.84 | C.3 |
| 1.652 | B.85 | C.3 |
| 1.653 | B.86 | C.3 |
| 1.654 | B.87 | C.3 |
| 1.655 | B.88 | C.3 |
| 1.656 | B.89 | C.3 |
| 1.657 | B.90 | C.3 |
| 1.658 | B.91 | C.3 |
| 1.659 | B.92 | C.3 |
| 1.660 | B.93 | C.3 |
| 1.661 | B.94 | C.3 |
| 1.662 | B.95 | C.3 |
| 1.663 | B.96 | C.3 |
| 1.664 | B.97 | C.3 |
| 1.665 | B.98 | C.3 |
| 1.666 | B.99 | C.3 |
| 1.667 | B.100 | C.3 |
| 1.668 | B.101 | C.3 |
| 1.669 | B.102 | C.3 |
| 1.670 | B.103 | C.3 |
| 1.671 | B.104 | C.3 |
| 1.672 | B.105 | C.3 |
| 1.673 | B.106 | C.3 |
| 1.674 | B.107 | C.3 |
| 1.675 | B.108 | C.3 |
| 1.676 | B.109 | C.3 |
| 1.677 | B.110 | C.3 |
| 1.678 | B.111 | C.3 |
| 1.679 | B.112 | C.3 |
| 1.680 | B.113 | C.3 |
| 1.681 | B.114 | C.3 |
| 1.682 | B.115 | C.3 |
| 1.683 | B.116 | C.3 |
| 1.684 | B.117 | C.3 |
| 1.685 | B.118 | C.3 |
| 1.686 | B.119 | C.3 |
| 1.687 | B.120 | C.3 |
| 1.688 | B.121 | C.3 |
| 1.689 | B.122 | C.3 |
| 1.690 | B.123 | C.3 |
| 1.691 | B.124 | C.3 |
| 1.692 | B.125 | C.3 |
| 1.693 | B.126 | C.3 |
| 1.694 | B.127 | C.3 |
| 1.695 | B.128 | C.3 |
| 1.696 | B.129 | C.3 |
| 1.697 | B.130 | C.3 |
| 1.698 | B.131 | C.3 |
| 1.699 | B.132 | C.3 |
| 1.700 | B.133 | C.3 |
| 1.701 | B.134 | C.3 |
| 1.702 | B.135 | C.3 |
| 1.703 | B.136 | C.3 |
| 1.704 | B.137 | C.3 |
| 1.705 | B.138 | C.3 |
| 1.706 | B.139 | C.3 |
| 1.707 | B.140 | C.3 |
| 1.708 | B.141 | C.3 |
| 1.709 | B.142 | C.3 |
| 1.710 | B.143 | C.3 |
| 1.711 | B.144 | C.3 |
| 1.712 | B.145 | C.3 |
| 1.713 | B.146 | C.3 |
| 1.714 | B.147 | C.3 |
| 1.715 | B.148 | C.3 |
| 1.716 | B.149 | C.3 |
| 1.717 | B.150 | C.3 |
| 1.718 | B.151 | C.3 |
| 1.719 | B.152 | C.3 |
| 1.720 | B.153 | C.3 |
| 1.721 | B.154 | C.3 |
| 1.722 | B.155 | C.3 |
| 1.723 | B.156 | C.3 |
| 1.724 | B.157 | C.3 |
| 1.725 | B.158 | C.3 |
| 1.726 | B.159 | C.3 |
| 1.727 | B.160 | C.3 |
| 1.728 | B.161 | C.3 |
| 1.729 | B.162 | C.3 |
| 1.730 | B.163 | C.3 |
| 1.731 | B.164 | C.3 |
| 1.732 | B.165 | C.3 |
| 1.733 | B.166 | C.3 |
| 1.734 | B.167 | C.3 |
| 1.735 | B.168 | C.3 |
| 1.736 | B.169 | C.3 |
| 1.737 | B.170 | C.3 |
| 1.738 | B.171 | C.3 |
| 1.739 | B.172 | C.3 |
| 1.740 | B.173 | C.3 |
| 1.741 | B.174 | C.3 |
| 1.742 | B.175 | C.3 |
| 1.743 | B.176 | C.3 |
| 1.744 | B.177 | C.3 |
| 1.745 | B.178 | C.3 |
| 1.746 | B.179 | C.3 |
| 1.747 | B.180 | C.3 |
| 1.748 | B.181 | C.3 |
| 1.749 | B.182 | C.3 |
| 1.750 | B.183 | C.3 |
| 1.751 | B.184 | C.3 |
| 1.752 | B.185 | C.3 |
| 1.753 | B.186 | C.3 |
| 1.754 | B.187 | C.3 |
| 1.755 | B.188 | C.3 |
| 1.756 | B.189 | C.3 |
| 1.757 | B.1 | C.4 |
| 1.758 | B.2 | C.4 |
| 1.759 | B.3 | C.4 |
| 1.760 | B.4 | C.4 |
| 1.761 | B.5 | C.4 |
| 1.762 | B.6 | C.4 |
| 1.763 | B.7 | C.4 |
| 1.764 | B.8 | C.4 |
| 1.765 | B.9 | C.4 |
| 1.766 | B.10 | C.4 |
| 1.767 | B.11 | C.4 |
| 1.768 | B.12 | C.4 |
| 1.769 | B.13 | C.4 |
| 1.770 | B.14 | C.4 |
| 1.771 | B.15 | C.4 |
| 1.772 | B.16 | C.4 |
| 1.773 | B.17 | C.4 |
| 1.774 | B.18 | C.4 |
| 1.775 | B.19 | C.4 |
| 1.776 | B.20 | C.4 |
| 1.777 | B.21 | C.4 |
| 1.778 | B.22 | C.4 |
| 1.779 | B.23 | C.4 |
| 1.780 | B.24 | C.4 |
| 1.781 | B.25 | C.4 |
| 1.782 | B.26 | C.4 |
| 1.783 | B.27 | C.4 |
| 1.784 | B.28 | C.4 |
| 1.785 | B.29 | C.4 |
| 1.786 | B.30 | C.4 |
| 1.787 | B.31 | C.4 |
| 1.788 | B.32 | C.4 |
| 1.789 | B.33 | C.4 |
| 1.790 | B.34 | C.4 |
| 1.791 | B.35 | C.4 |
| 1.792 | B.36 | C.4 |
| 1.793 | B.37 | C.4 |
| 1.794 | B.38 | C.4 |
| 1.795 | B.39 | C.4 |
| 1.796 | B.40 | C.4 |
| 1.797 | B.41 | C.4 |
| 1.798 | B.42 | C.4 |
| 1.799 | B.43 | C.4 |
| 1.800 | B.44 | C.4 |
| 1.801 | B.45 | C.4 |
| 1.802 | B.46 | C.4 |
| 1.803 | B.47 | C.4 |
| 1.804 | B.48 | C.4 |
| 1.805 | B.49 | C.4 |
| 1.806 | B.50 | C.4 |
| 1.807 | B.51 | C.4 |
| 1.808 | B.52 | C.4 |
| 1.809 | B.53 | C.4 |
| 1.810 | B.54 | C.4 |
| 1.811 | B.55 | C.4 |
| 1.812 | B.56 | C.4 |
| 1.813 | B.57 | C.4 |
| 1.814 | B.58. | C.4 |
| 1.815 | B.59 | C.4 |
| 1.816 | B.60 | C.4 |
| 1.817 | B.61 | C.4 |
| 1.818 | B.62 | C.4 |
| 1.819 | B.63 | C.4 |
| 1.820 | B.64 | C.4 |
| 1.821 | B.65 | C.4 |
| 1.822 | B.66 | C.4 |
| 1.823 | B.67 | C.4 |
| 1.824 | B.68 | C.4 |
| 1.825 | B.69 | C.4 |
| 1.826 | B.70 | C.4 |
| 1.827 | B.71 | C.4 |
| 1.828 | B.72 | C.4 |
| 1.829 | B.73 | C.4 |
| 1.830 | B.74 | C.4 |
| 1.831 | B.75 | C.4 |
| 1.832 | B.76 | C.4 |
| 1.833 | B.77 | C.4 |
| 1.834 | B.78 | C.4 |
| 1.835 | B.79 | C.4 |
| 1.836 | B.80 | C.4 |
| 1.837 | B.81 | C.4 |
| 1.838 | B.82 | C.4 |
| 1.839 | B.83 | C.4 |
| 1.840 | B.84 | C.4 |
| 1.841 | B.85 | C.4 |
| 1.842 | B.86 | C.4 |
| 1.843 | B.87 | C.4 |
| 1.844 | B.88 | C.4 |
| 1.845 | B.89 | C.4 |
| 1.846 | B.90 | C.4 |
| 1.847 | B.91 | C.4 |
| 1.848 | B.92 | C.4 |
| 1.849 | B.93 | C.4 |
| 1.850 | B.94 | C.4 |
| 1.851 | B.95 | C.4 |
| 1.852 | B.96 | C.4 |
| 1.853 | B.97 | C.4 |
| 1.854 | B.98 | C.4 |
| 1.855 | B.99 | C.4 |
| 1.856 | B.100 | C.4 |
| 1.857 | B.101 | C.4 |
| 1.858 | B.102 | C.4 |
| 1.859 | B.103 | C.4 |
| 1.860 | B.104 | C.4 |
| 1.861 | B.105 | C.4 |
| 1.862 | B.106 | C.4 |
| 1.863 | B.107 | C.4 |
| 1.864 | B.108 | C.4 |
| 1.865 | B.109 | C.4 |
| 1.866 | B.110 | C.4 |
| 1.867 | B.111 | C.4 |
| 1.868 | B.112 | C.4 |
| 1.869 | B.113 | C.4 |
| 1.870 | B.114 | C.4 |
| 1.871 | B.115 | C.4 |
| 1.872 | B.116 | C.4 |
| 1.873 | B.117 | C.4 |
| 1.874 | B.118 | C.4 |
| 1.875 | B.119 | C.4 |
| 1.876 | B.120 | C.4 |
| 1.877 | B.121 | C.4 |
| 1.878 | B.122 | C.4 |
| 1.879 | B.123 | C.4 |
| 1.880 | B.124 | C.4 |
| 1.881 | B.125 | C.4 |
| 1.882 | B.126 | C.4 |
| 1.883 | B.127 | C.4 |
| 1.884 | B.128 | C.4 |
| 1.885 | B.129 | C.4 |
| 1.886 | B.130 | C.4 |
| 1.887 | B.131 | C.4 |
| 1.888 | B.132 | C.4 |
| 1.889 | B.133 | C.4 |
| 1.890 | B.134 | C.4 |
| 1.891 | B.135 | C.4 |
| 1.892 | B.136 | C.4 |
| 1.893 | B.137 | C.4 |
| 1.894 | B.138 | C.4 |
| 1.895 | B.139 | C.4 |
| 1.896 | B.140 | C.4 |
| 1.897 | B.141 | C.4 |
| 1.898 | B.142 | C.4 |
| 1.899 | B.143 | C.4 |
| 1.900 | B.144 | C.4 |
| 1.901 | B.145 | C.4 |
| 1.902 | B.146 | C.4 |
| 1.903 | B.147 | C.4 |
| 1.904 | B.148 | C.4 |
| 1.905 | B.149 | C.4 |
| 1.906 | B.150 | C.4 |
| 1.907 | B.151 | C.4 |
| 1.908 | B.152 | C.4 |
| 1.909 | B.153 | C.4 |
| 1.910 | B.154 | C.4 |
| 1.911 | B.155 | C.4 |
| 1.912 | B.156 | C.4 |
| 1.913 | B.157 | C.4 |
| 1.914 | B.158 | C.4 |
| 1.915 | B.159 | C.4 |
| 1.916 | B.160 | C.4 |
| 1.917 | B.161 | C.4 |
| 1.918 | B.162 | C.4 |
| 1.919 | B.163 | C.4 |
| 1.920 | B.164 | C.4 |
| 1.921 | B.165 | C.4 |
| 1.922 | B.166 | C.4 |
| 1.923 | B.167 | C.4 |
| 1.924 | B.168 | C.4 |
| 1.925 | B.169 | C.4 |
| 1.926 | B.170 | C.4 |
| 1.927 | B.171 | C.4 |
| 1.928 | B.172 | C.4 |
| 1.929 | B.173 | C.4 |
| 1.930 | B.174 | C.4 |
| 1.931 | B.175 | C.4 |
| 1.932 | B.176 | C.4 |
| 1.933 | B.177 | C.4 |
| 1.934 | B.178 | C.4 |
| 1.935 | B.179 | C.4 |
| 1.936 | B.180 | C.4 |
| 1.937 | B.181 | C.4 |
| 1.938 | B.182 | C.4 |
| 1.939 | B.183 | C.4 |
| 1.940 | B.184 | C.4 |
| 1.941 | B.185 | C.4 |
| 1.942 | B.186 | C.4 |
| 1.943 | B.187 | C.4 |
| 1.944 | B.188 | C.4 |
| 1.945 | B.189 | C.4 |
| 1.946 | B.1 | C.5 |
| 1.947 | B.2 | C.5 |
| 1.948 | B.3 | C.5 |
| 1.949 | B.4 | C.5 |
| 1.950 | B.5 | C.5 |
| 1.951 | B.6 | C.5 |
| 1.952 | B.7 | C.5 |
| 1.953 | B.8 | C.5 |
| 1.954 | B.9 | C.5 |
| 1.955 | B.10 | C.5 |
| 1.956 | B.11 | C.5 |
| 1.957 | B.12 | C.5 |
| 1.958 | B.13 | C.5 |
| 1.959 | B.14 | C.5 |
| 1.960 | B.15 | C.5 |
| 1.961 | B.16 | C.5 |
| 1.962 | B.17 | C.5 |
| 1.963 | B.18 | C.5 |
| 1.964 | B.19 | C.5 |
| 1.965 | B.20 | C.5 |
| 1.966 | B.21 | C.5 |
| 1.967 | B.22 | C.5 |
| 1.968 | B.23 | C.5 |
| 1.969 | B.24 | C.5 |
| 1.970 | B.25 | C.5 |
| 1.971 | B.26 | C.5 |
| 1.972 | B.27 | C.5 |
| 1.973 | B.28 | C.5 |
| 1.974 | B.29 | C.5 |
| 1.975 | B.30 | C.5 |
| 1.976 | B.31 | C.5 |
| 1.977 | B.32 | C.5 |
| 1.978 | B.33 | C.5 |
| 1.979 | B.34 | C.5 |
| 1.980 | B.35 | C.5 |
| 1.981 | B.36 | C.5 |
| 1.982 | B.37 | C.5 |
| 1.983 | B.38 | C.5 |
| 1.984 | B.39 | C.5 |
| 1.985 | B.40 | C.5 |
| 1.986 | B.41 | C.5 |
| 1.987 | B.42 | C.5 |
| 1.988 | B.43 | C.5 |
| 1.989 | B.44 | C.5 |
| 1.990 | B.45 | C.5 |
| 1.991 | B.46 | C.5 |
| 1.992 | B.47 | C.5 |
| 1.993 | B.48 | C.5 |
| 1.994 | B.49 | C.5 |
| 1.995 | B.50 | C.5 |
| 1.996 | B.51 | C.5 |
| 1.997 | B.52 | C.5 |
| 1.998 | B.53 | C.5 |
| 1.999 | B.54 | C.5 |
| 1.1000 | B.55 | C.5 |
| 1.1001 | B.56 | C.5 |
| 1.1002 | B.57 | C.5 |
| 1.1003 | B.58. | C.5 |
| 1.1004 | B.59 | C.5 |
| 1.1005 | B.60 | C.5 |
| 1.1006 | B.61 | C.5 |
| 1.1007 | B.62 | C.5 |
| 1.1008 | B.63 | C.5 |
| 1.1009 | B.64 | C.5 |
| 1.1010 | B.65 | C.5 |
| 1.1011 | B.66 | C.5 |
| 1.1012 | B.67 | C.5 |
| 1.1013 | B.68 | C.5 |
| 1.1014 | B.69 | C.5 |
| 1.1015 | B.70 | C.5 |
| 1.1016 | B.71 | C.5 |
| 1.1017 | B.72 | C.5 |
| 1.1018 | B.73 | C.5 |
| 1.1019 | B.74 | C.5 |
| 1.1020 | B.75 | C.5 |
| 1.1021 | B.76 | C.5 |
| 1.1022 | B.77 | C.5 |
| 1.1023 | B.78 | C.5 |
| 1.1024 | B.79 | C.5 |
| 1.1025 | B.80 | C.5 |
| 1.1026 | B.81 | C.5 |
| 1.1027 | B.82 | C.5 |
| 1.1028 | B.83 | C.5 |
| 1.1029 | B.84 | C.5 |
| 1.1030 | B.85 | C.5 |
| 1.1031 | B.86 | C.5 |
| 1.1032 | B.87 | C.5 |
| 1.1033 | B.88 | C.5 |
| 1.1034 | B.89 | C.5 |
| 1.1035 | B.90 | C.5 |
| 1.1036 | B.91 | C.5 |
| 1.1037 | B.92 | C.5 |
| 1.1038 | B.93 | C.5 |
| 1.1039 | B.94 | C.5 |
| 1.1040 | B.95 | C.5 |
| 1.1041 | B.96 | C.5 |
| 1.1042 | B.97 | C.5 |
| 1.1043 | B.98 | C.5 |
| 1.1044 | B.99 | C.5 |
| 1.1045 | B.100 | C.5 |
| 1.1046 | B.101 | C.5 |
| 1.1047 | B.102 | C.5 |
| 1.1048 | B.103 | C.5 |
| 1.1049 | B.104 | C.5 |
| 1.1050 | B.105 | C.5 |
| 1.1051 | B.106 | C.5 |
| 1.1052 | B.107 | C.5 |
| 1.1053 | B.108 | C.5 |
| 1.1054 | B.109 | C.5 |
| 1.1055 | B.110 | C.5 |
| 1.1056 | B.111 | C.5 |
| 1.1057 | B.112 | C.5 |
| 1.1058 | B.113 | C.5 |
| 1.1059 | B.114 | C.5 |
| 1.1060 | B.115 | C.5 |
| 1.1061 | B.116 | C.5 |
| 1.1062 | B.117 | C.5 |
| 1.1063 | B.118 | C.5 |
| 1.1064 | B.119 | C.5 |
| 1.1065 | B.120 | C.5 |
| 1.1066 | B.121 | C.5 |
| 1.1067 | B.122 | C.5 |
| 1.1068 | B.123 | C.5 |
| 1.1069 | B.124 | C.5 |
| 1.1070 | B.125 | C.5 |
| 1.1071 | B.126 | C.5 |
| 1.1072 | B.127 | C.5 |
| 1.1073 | B.128 | C.5 |
| 1.1074 | B.129 | C.5 |
| 1.1075 | B.130 | C.5 |
| 1.1076 | B.131 | C.5 |
| 1.1077 | B.132 | C.5 |
| 1.1078 | B.133 | C.5 |
| 1.1079 | B.134 | C.5 |
| 1.1080 | B.135 | C.5 |
| 1.1081 | B.136 | C.5 |
| 1.1082 | B.137 | C.5 |
| 1.1083 | B.138 | C.5 |
| 1.1084 | B.139 | C.5 |
| 1.1085 | B.140 | C.5 |
| 1.1086 | B.141 | C.5 |
| 1.1087 | B.142 | C.5 |
| 1.1088 | B.143 | C.5 |
| 1.1089 | B.144 | C.5 |
| 1.1090 | B.145 | C.5 |
| 1.1091 | B.146 | C.5 |
| 1.1092 | B.147 | C.5 |
| 1.1093 | B.148 | C.5 |
| 1.1094 | B.149 | C.5 |
| 1.1095 | B.150 | C.5 |
| 1.1096 | B.151 | C.5 |
| 1.1097 | B.152 | C.5 |
| 1.1098 | B.153 | C.5 |
| 1.1099 | B.154 | C.5 |
| 1.1100 | B.155 | C.5 |
| 1.1101 | B.156 | C.5 |
| 1.1102 | B.157 | C.5 |
| 1.1103 | B.158 | C.5 |
| 1.1104 | B.159 | C.5 |
| 1.1105 | B.160 | C.5 |
| 1.1106 | B.161 | C.5 |
| 1.1107 | B.162 | C.5 |
| 1.1108 | B.163 | C.5 |
| 1.1109 | B.164 | C.5 |
| 1.1110 | B.165 | C.5 |
| 1.1111 | B.166 | C.5 |
| 1.1112 | B.167 | C.5 |
| 1.1113 | B.168 | C.5 |
| 1.1114 | B.169 | C.5 |
| 1.1115 | B.170 | C.5 |
| 1.1116 | B.171 | C.5 |
| 1.1117 | B.172 | C.5 |
| 1.1118 | B.173 | C.5 |
| 1.1119 | B.174 | C.5 |
| 1.1120 | B.175 | C.5 |
| 1.1121 | B.176 | C.5 |
| 1.1122 | B.177 | C.5 |
| 1.1123 | B.178 | C.5 |
| 1.1124 | B.179 | C.5 |
| 1.1125 | B.180 | C.5 |
| 1.1126 | B.181 | C.5 |
| 1.1127 | B.182 | C.5 |
| 1.1128 | B.183 | C.5 |
| 1.1129 | B.184 | C.5 |
| 1.1130 | B.185 | C.5 |
| 1.1131 | B.186 | C.5 |
| 1.1132 | B.187 | C.5 |
| 1.1133 | B.188 | C.5 |
| 1.1134 | B.189 | C.5 |
| 1.1135 | B.1 | C.6 |
| 1.1136 | B.2 | C.6 |
| 1.1137 | B.3 | C.6 |
| 1.1138 | B.4 | C.6 |
| 1.1139 | B.5 | C.6 |
| 1.1140 | B.6 | C.6 |
| 1.1141 | B.7 | C.6 |
| 1.1142 | B.8 | C.6 |
| 1.1143 | B.9 | C.6 |
| 1.1144 | B.10 | C.6 |
| 1.1145 | B.11 | C.6 |
| 1.1146 | B.12 | C.6 |
| 1.1147 | B.13 | C.6 |
| 1.1148 | B.14 | C.6 |
| 1.1149 | B.15 | C.6 |
| 1.1150 | B.16 | C.6 |
| 1.1151 | B.17 | C.6 |
| 1.1152 | B.18 | C.6 |
| 1.1153 | B.19 | C.6 |
| 1.1154 | B.20 | C.6 |
| 1.1155 | B.21 | C.6 |
| 1.1156 | B.22 | C.6 |
| 1.1157 | B.23 | C.6 |
| 1.1158 | B.24 | C.6 |
| 1.1159 | B.25 | C.6 |
| 1.1160 | B.26 | C.6 |
| 1.1161 | B.27 | C.6 |
| 1.1162 | B.28 | C.6 |
| 1.1163 | B.29 | C.6 |
| 1.1164 | B.30 | C.6 |
| 1.1165 | B.31 | C.6 |
| 1.1166 | B.32 | C.6 |
| 1.1167 | B.33 | C.6 |
| 1.1168 | B.34 | C.6 |
| 1.1169 | B.35 | C.6 |
| 1.1170 | B.36 | C.6 |
| 1.1171 | B.37 | C.6 |
| 1.1172 | B.38 | C.6 |
| 1.1173 | B.39 | C.6 |
| 1.1174 | B.40 | C.6 |
| 1.1175 | B.41 | C.6 |
| 1.1176 | B.42 | C.6 |
| 1.1177 | B.43 | C.6 |
| 1.1178 | B.44 | C.6 |
| 1.1179 | B.45 | C.6 |
| 1.1180 | B.46 | C.6 |
| 1.1181 | B.47 | C.6 |
| 1.1182 | B.48 | C.6 |
| 1.1183 | B.49 | C.6 |
| 1.1184 | B.50 | C.6 |
| 1.1185 | B.51 | C.6 |
| 1.1186 | B.52 | C.6 |
| 1.1187 | B.53 | C.6 |
| 1.1188 | B.54 | C.6 |
| 1.1189 | B.55 | C.6 |
| 1.1190 | B.56 | C.6 |
| 1.1191 | B.57 | C.6 |
| 1.1192 | B.58. | C.6 |
| 1.1193 | B.59 | C.6 |
| 1.1194 | B.60 | C.6 |
| 1.1195 | B.61 | C.6 |
| 1.1196 | B.62 | C.6 |
| 1.1197 | B.63 | C.6 |
| 1.1198 | B.64 | C.6 |
| 1.1199 | B.65 | C.6 |
| 1.1200 | B.66 | C.6 |
| 1.1201 | B.67 | C.6 |
| 1.1202 | B.68 | C.6 |
| 1.1203 | B.69 | C.6 |
| 1.1204 | B.70 | C.6 |
| 1.1205 | B.71 | C.6 |
| 1.1206 | B.72 | C.6 |
| 1.1207 | B.73 | C.6 |
| 1.1208 | B.74 | C.6 |
| 1.1209 | B.75 | C.6 |
| 1.1210 | B.76 | C.6 |
| 1.1211 | B.77 | C.6 |
| 1.1212 | B.78 | C.6 |
| 1.1213 | B.79 | C.6 |
| 1.1214 | B.80 | C.6 |
| 1.1215 | B.81 | C.6 |
| 1.1216 | B.82 | C.6 |
| 1.1217 | B.83 | C.6 |
| 1.1218 | B.84 | C.6 |
| 1.1219 | B.85 | C.6 |
| 1.1220 | B.86 | C.6 |
| 1.1221 | B.87 | C.6 |
| 1.1222 | B.88 | C.6 |
| 1.1223 | B.89 | C.6 |
| 1.1224 | B.90 | C.6 |
| 1.1225 | B.91 | C.6 |
| 1.1226 | B.92 | C.6 |
| 1.1227 | B.93 | C.6 |
| 1.1228 | B.94 | C.6 |
| 1.1229 | B.95 | C.6 |
| 1.1230 | B.96 | C.6 |
| 1.1231 | B.97 | C.6 |
| 1.1232 | B.98 | C.6 |
| 1.1233 | B.99 | C.6 |
| 1.1234 | B.100 | C.6 |
| 1.1235 | B.101 | C.6 |
| 1.1236 | B.102 | C.6 |
| 1.1237 | B.103 | C.6 |
| 1.1238 | B.104 | C.6 |
| 1.1239 | B.105 | C.6 |
| 1.1240 | B.106 | C.6 |
| 1.1241 | B.107 | C.6 |
| 1.1242 | B.108 | C.6 |
| 1.1243 | B.109 | C.6 |
| 1.1244 | B.110 | C.6 |
| 1.1245 | B.111 | C.6 |
| 1.1246 | B.112 | C.6 |
| 1.1247 | B.113 | C.6 |
| 1.1248 | B.114 | C.6 |
| 1.1249 | B.115 | C.6 |
| 1.1250 | B.116 | C.6 |
| 1.1251 | B.117 | C.6 |
| 1.1252 | B.118 | C.6 |
| 1.1253 | B.119 | C.6 |
| 1.1254 | B.120 | C.6 |
| 1.1255 | B.121 | C.6 |
| 1.1256 | B.122 | C.6 |
| 1.1257 | B.123 | C.6 |
| 1.1258 | B.124 | C.6 |
| 1.1259 | B.125 | C.6 |
| 1.1260 | B.126 | C.6 |
| 1.1261 | B.127 | C.6 |
| 1.1262 | B.128 | C.6 |
| 1.1263 | B.129 | C.6 |
| 1.1264 | B.130 | C.6 |
| 1.1265 | B.131 | C.6 |
| 1.1266 | B.132 | C.6 |
| 1.1267 | B.133 | C.6 |
| 1.1268 | B.134 | C.6 |
| 1.1269 | B.135 | C.6 |
| 1.1270 | B.136 | C.6 |
| 1.1271 | B.137 | C.6 |
| 1.1272 | B.138 | C.6 |
| 1.1273 | B.139 | C.6 |
| 1.1274 | B.140 | C.6 |
| 1.1275 | B.141 | C.6 |
| 1.1276 | B.142 | C.6 |
| 1.1277 | B.143 | C.6 |
| 1.1278 | B.144 | C.6 |
| 1.1279 | B.145 | C.6 |
| 1.1280 | B.146 | C.6 |
| 1.1281 | B.147 | C.6 |
| 1.1282 | B.148 | C.6 |
| 1.1283 | B.149 | C.6 |
| 1.1284 | B.150 | C.6 |
| 1.1285 | B.151 | C.6 |
| 1.1286 | B.152 | C.6 |
| 1.1287 | B.153 | C.6 |
| 1.1288 | B.154 | C.6 |
| 1.1289 | B.155 | C.6 |
| 1.1290 | B.156 | C.6 |
| 1.1291 | B.157 | C.6 |
| 1.1292 | B.158 | C.6 |
| 1.1293 | B.159 | C.6 |
| 1.1294 | B.160 | C.6 |
| 1.1295 | B.161 | C.6 |
| 1.1296 | B.162 | C.6 |
| 1.1297 | B.163 | C.6 |
| 1.1298 | B.164 | C.6 |
| 1.1299 | B.165 | C.6 |
| 1.1300 | B.166 | C.6 |
| 1.1301 | B.167 | C.6 |
| 1.1302 | B.168 | C.6 |
| 1.1303 | B.169 | C.6 |
| 1.1304 | B.170 | C.6 |
| 1.1305 | B.171 | C.6 |
| 1.1306 | B.172 | C.6 |
| 1.1307 | B.173 | C.6 |
| 1.1308 | B.174 | C.6 |
| 1.1309 | B.175 | C.6 |
| 1.1310 | B.176 | C.6 |
| 1.1311 | B.177 | C.6 |
| 1.1312 | B.178 | C.6 |
| 1.1313 | B.179 | C.6 |
| 1.1314 | B.180 | C.6 |
| 1.1315 | B.181 | C.6 |
| 1.1316 | B.182 | C.6 |
| 1.1317 | B.183 | C.6 |
| 1.1318 | B.184 | C.6 |
| 1.1319 | B.185 | C.6 |
| 1.1320 | B.186 | C.6 |
| 1.1321 | B.187 | C.6 |
| 1.1322 | B.188 | C.6 |
| 1.1323 | B.189 | C.6 |
| 1.1324 | B.1 | C.7 |
| 1.1325 | B.2 | C.7 |
| 1.1326 | B.3 | C.7 |
| 1.1327 | B.4 | C.7 |
| 1.1328 | B.5 | C.7 |
| 1.1329 | B.6 | C.7 |
| 1.1330 | B.7 | C.7 |
| 1.1331 | B.8 | C.7 |
| 1.1332 | B.9 | C.7 |
| 1.1333 | B.10 | C.7 |
| 1.1334 | B.11 | C.7 |
| 1.1335 | B.12 | C.7 |
| 1.1336 | B.13 | C.7 |
| 1.1337 | B.14 | C.7 |
| 1.1338 | B.15 | C.7 |
| 1.1339 | B.16 | C.7 |
| 1.1340 | B.17 | C.7 |
| 1.1341 | B.18 | C.7 |
| 1.1342 | B.19 | C.7 |
| 1.1343 | B.20 | C.7 |
| 1.1344 | B.21 | C.7 |
| 1.1345 | B.22 | C.7 |
| 1.1346 | B.23 | C.7 |
| 1.1347 | B.24 | C.7 |
| 1.1348 | B.25 | C.7 |
| 1.1349 | B.26 | C.7 |
| 1.1350 | B.27 | C.7 |
| 1.1351 | B.28 | C.7 |
| 1.1352 | B.29 | C.7 |
| 1.1353 | B.30 | C.7 |
| 1.1354 | B.31 | C.7 |
| 1.1355 | B.32 | C.7 |
| 1.1356 | B.33 | C.7 |
| 1.1357 | B.34 | C.7 |
| 1.1358 | B.35 | C.7 |
| 1.1359 | B.36 | C.7 |
| 1.1360 | B.37 | C.7 |
| 1.1361 | B.38 | C.7 |
| 1.1362 | B.39 | C.7 |
| 1.1363 | B.40 | C.7 |
| 1.1364 | B.41 | C.7 |
| 1.1365 | B.42 | C.7 |
| 1.1366 | B.43 | C.7 |
| 1.1367 | B.44 | C.7 |
| 1.1368 | B.45 | C.7 |
| 1.1369 | B.46 | C.7 |
| 1.1370 | B.47 | C.7 |
| 1.1371 | B.48 | C.7 |
| 1.1372 | B.49 | C.7 |
| 1.1373 | B.50 | C.7 |
| 1.1374 | B.51 | C.7 |
| 1.1375 | B.52 | C.7 |
| 1.1376 | B.53 | C.7 |
| 1.1377 | B.54 | C.7 |
| 1.1378 | B.55 | C.7 |
| 1.1379 | B.56 | C.7 |
| 1.1380 | B.57 | C.7 |
| 1.1381 | B.58. | C.7 |
| 1.1382 | B.59 | C.7 |
| 1.1383 | B.60 | C.7 |
| 1.1384 | B.61 | C.7 |
| 1.1385 | B.62 | C.7 |
| 1.1386 | B.63 | C.7 |
| 1.1387 | B.64 | C.7 |
| 1.1388 | B.65 | C.7 |
| 1.1389 | B.66 | C.7 |
| 1.1390 | B.67 | C.7 |
| 1.1391 | B.68 | C.7 |
| 1.1392 | B.69 | C.7 |
| 1.1393 | B.70 | C.7 |
| 1.1394 | B.71 | C.7 |
| 1.1395 | B.72 | C.7 |
| 1.1396 | B.73 | C.7 |
| 1.1397 | B.74 | C.7 |
| 1.1398 | B.75 | C.7 |
| 1.1399 | B.76 | C.7 |
| 1.1400 | B.77 | C.7 |
| 1.1401 | B.78 | C.7 |
| 1.1402 | B.79 | C.7 |
| 1.1403 | B.80 | C.7 |
| 1.1404 | B.81 | C.7 |
| 1.1405 | B.82 | C.7 |
| 1.1406 | B.83 | C.7 |
| 1.1407 | B.84 | C.7 |
| 1.1408 | B.85 | C.7 |
| 1.1409 | B.86 | C.7 |
| 1.1410 | B.87 | C.7 |
| 1.1411 | B.88 | C.7 |
| 1.1412 | B.89 | C.7 |
| 1.1413 | B.90 | C.7 |
| 1.1414 | B.91 | C.7 |
| 1.1415 | B.92 | C.7 |
| 1.1416 | B.93 | C.7 |
| 1.1417 | B.94 | C.7 |
| 1.1418 | B.95 | C.7 |
| 1.1419 | B.96 | C.7 |
| 1.1420 | B.97 | C.7 |
| 1.1421 | B.98 | C.7 |
| 1.1422 | B.99 | C.7 |
| 1.1423 | B.100 | C.7 |
| 1.1424 | B.101 | C.7 |
| 1.1425 | B.102 | C.7 |
| 1.1426 | B.103 | C.7 |
| 1.1427 | B.104 | C.7 |
| 1.1428 | B.105 | C.7 |
| 1.1429 | B.106 | C.7 |
| 1.1430 | B.107 | C.7 |
| 1.1431 | B.108 | C.7 |
| 1.1432 | B.109 | C.7 |
| 1.1433 | B.110 | C.7 |
| 1.1434 | B.111 | C.7 |
| 1.1435 | B.112 | C.7 |
| 1.1436 | B.113 | C.7 |
| 1.1437 | B.114 | C.7 |
| 1.1438 | B.115 | C.7 |
| 1.1439 | B.116 | C.7 |
| 1.1440 | B.117 | C.7 |
| 1.1441 | B.118 | C.7 |
| 1.1442 | B.119 | C.7 |
| 1.1443 | B.120 | C.7 |
| 1.1444 | B.121 | C.7 |
| 1.1445 | B.122 | C.7 |
| 1.1446 | B.123 | C.7 |
| 1.1447 | B.124 | C.7 |
| 1.1448 | B.125 | C.7 |
| 1.1449 | B.126 | C.7 |
| 1.1450 | B.127 | C.7 |
| 1.1451 | B.128 | C.7 |
| 1.1452 | B.129 | C.7 |
| 1.1453 | B.130 | C.7 |
| 1.1454 | B.131 | C.7 |
| 1.1455 | B.132 | C.7 |
| 1.1456 | B.133 | C.7 |
| 1.1457 | B.134 | C.7 |
| 1.1458 | B.135 | C.7 |
| 1.1459 | B.136 | C.7 |
| 1.1460 | B.137 | C.7 |
| 1.1461 | B.138 | C.7 |
| 1.1462 | B.139 | C.7 |
| 1.1463 | B.140 | C.7 |
| 1.1464 | B.141 | C.7 |
| 1.1465 | B.142 | C.7 |
| 1.1466 | B.143 | C.7 |
| 1.1467 | B.144 | C.7 |
| 1.1468 | B.145 | C.7 |
| 1.1469 | B.146 | C.7 |
| 1.1470 | B.147 | C.7 |
| 1.1471 | B.148 | C.7 |
| 1.1472 | B.149 | C.7 |
| 1.1473 | B.150 | C.7 |
| 1.1474 | B.151 | C.7 |
| 1.1475 | B.152 | C.7 |
| 1.1476 | B.153 | C.7 |
| 1.1477 | B.154 | C.7 |
| 1.1478 | B.155 | C.7 |
| 1.1479 | B.156 | C.7 |
| 1.1480 | B.157 | C.7 |
| 1.1481 | B.158 | C.7 |
| 1.1482 | B.159 | C.7 |
| 1.1483 | B.160 | C.7 |
| 1.1484 | B.161 | C.7 |
| 1.1485 | B.162 | C.7 |
| 1.1486 | B.163 | C.7 |
| 1.1487 | B.164 | C.7 |
| 1.1488 | B.165 | C.7 |
| 1.1489 | B.166 | C.7 |
| 1.1490 | B.167 | C.7 |
| 1.1491 | B.168 | C.7 |
| 1.1492 | B.169 | C.7 |
| 1.1493 | B.170 | C.7 |
| 1.1494 | B.171 | C.7 |
| 1.1495 | B.172 | C.7 |
| 1.1496 | B.173 | C.7 |
| 1.1497 | B.174 | C.7 |
| 1.1498 | B.175 | C.7 |
| 1.1499 | B.176 | C.7 |
| 1.1500 | B.177 | C.7 |
| 1.1501 | B.178 | C.7 |
| 1.1502 | B.179 | C.7 |
| 1.1503 | B.180 | C.7 |
| 1.1504 | B.181 | C.7 |
| 1.1505 | B.182 | C.7 |
| 1.1506 | B.183 | C.7 |
| 1.1507 | B.184 | C.7 |
| 1.1508 | B.185 | C.7 |
| 1.1509 | B.186 | C.7 |
| 1.1510 | B.187 | C.7 |
| 1.1511 | B.188 | C.7 |
| 1.1512 | B.189 | C.7 |
| 1.1513 | B.1 | C.8 |
| 1.1514 | B.2 | C.8 |
| 1.1515 | B.3 | C.8 |
| 1.1516 | B.4 | C.8 |
| 1.1517 | B.5 | C.8 |
| 1.1518 | B.6 | C.8 |
| 1.1519 | B.7 | C.8 |
| 1.1520 | B.8 | C.8 |
| 1.1521 | B.9 | C.8 |
| 1.1522 | B.10 | C.8 |
| 1.1523 | B.11 | C.8 |
| 1.1524 | B.12 | C.8 |
| 1.1525 | B.13 | C.8 |
| 1.1526 | B.14 | C.8 |
| 1.1527 | B.15 | C.8 |
| 1.1528 | B.16 | C.8 |
| 1.1529 | B.17 | C.8 |
| 1.1530 | B.18 | C.8 |
| 1.1531 | B.19 | C.8 |
| 1.1532 | B.20 | C.8 |
| 1.1533 | B.21 | C.8 |
| 1.1534 | B.22 | C.8 |
| 1.1535 | B.23 | C.8 |
| 1.1536 | B.24 | C.8 |
| 1.1537 | B.25 | C.8 |
| 1.1538 | B.26 | C.8 |
| 1.1539 | B.27 | C.8 |
| 1.1540 | B.28 | C.8 |
| 1.1541 | B.29 | C.8 |
| 1.1542 | B.30 | C.8 |
| 1.1543 | B.31 | C.8 |
| 1.1544 | B.32 | C.8 |
| 1.1545 | B.33 | C.8 |
| 1.1546 | B.34 | C.8 |
| 1.1547 | B.35 | C.8 |
| 1.1548 | B.36 | C.8 |
| 1.1549 | B.37 | C.8 |
| 1.1550 | B.38 | C.8 |
| 1.1551 | B.39 | C.8 |
| 1.1552 | B.40 | C.8 |
| 1.1553 | B.41 | C.8 |
| 1.1554 | B.42 | C.8 |
| 1.1555 | B.43 | C.8 |
| 1.1556 | B.44 | C.8 |
| 1.1557 | B.45 | C.8 |
| 1.1558 | B.46 | C.8 |
| 1.1559 | B.47 | C.8 |
| 1.1560 | B.48 | C.8 |
| 1.1561 | B.49 | C.8 |
| 1.1562 | B.50 | C.8 |
| 1.1563 | B.51 | C.8 |
| 1.1564 | B.52 | C.8 |
| 1.1565 | B.53 | C.8 |
| 1.1566 | B.54 | C.8 |
| 1.1567 | B.55 | C.8 |
| 1.1568 | B.56 | C.8 |
| 1.1569 | B.57 | C.8 |
| 1.1570 | B.58. | C.8 |
| 1.1571 | B.59 | C.8 |
| 1.1572 | B.60 | C.8 |
| 1.1573 | B.61 | C.8 |
| 1.1574 | B.62 | C.8 |
| 1.1575 | B.63 | C.8 |
| 1.1576 | B.64 | C.8 |
| 1.1577 | B.65 | C.8 |
| 1.1578 | B.66 | C.8 |
| 1.1579 | B.67 | C.8 |
| 1.1580 | B.68 | C.8 |
| 1.1581 | B.69 | C.8 |
| 1.1582 | B.70 | C.8 |
| 1.1583 | B.71 | C.8 |
| 1.1584 | B.72 | C.8 |
| 1.1585 | B.73 | C.8 |
| 1.1586 | B.74 | C.8 |
| 1.1587 | B.75 | C.8 |
| 1.1588 | B.76 | C.8 |
| 1.1589 | B.77 | C.8 |
| 1.1590 | B.78 | C.8 |
| 1.1591 | B.79 | C.8 |
| 1.1592 | B.80 | C.8 |
| 1.1593 | B.81 | C.8 |
| 1.1594 | B.82 | C.8 |
| 1.1595 | B.83 | C.8 |
| 1.1596 | B.84 | C.8 |
| 1.1597 | B.85 | C.8 |
| 1.1598 | B.86 | C.8 |
| 1.1599 | B.87 | C.8 |
| 1.1600 | B.88 | C.8 |
| 1.1601 | B.89 | C.8 |
| 1.1602 | B.90 | C.8 |
| 1.1603 | B.91 | C.8 |
| 1.1604 | B.92 | C.8 |
| 1.1605 | B.93 | C.8 |
| 1.1606 | B.94 | C.8 |
| 1.1607 | B.95 | C.8 |
| 1.1608 | B.96 | C.8 |
| 1.1609 | B.97 | C.8 |
| 1.1610 | B.98 | C.8 |
| 1.1611 | B.99 | C.8 |
| 1.1612 | B.100 | C.8 |
| 1.1613 | B.101 | C.8 |
| 1.1614 | B.102 | C.8 |
| 1.1615 | B.103 | C.8 |
| 1.1616 | B.104 | C.8 |
| 1.1617 | B.105 | C.8 |
| 1.1618 | B.106 | C.8 |
| 1.1619 | B.107 | C.8 |
| 1.1620 | B.108 | C.8 |
| 1.1621 | B.109 | C.8 |
| 1.1622 | B.110 | C.8 |
| 1.1623 | B.111 | C.8 |
| 1.1624 | B.112 | C.8 |
| 1.1625 | B.113 | C.8 |
| 1.1626 | B.114 | C.8 |
| 1.1627 | B.115 | C.8 |
| 1.1628 | B.116 | C.8 |
| 1.1629 | B.117 | C.8 |
| 1.1630 | B.118 | C.8 |
| 1.1631 | B.119 | C.8 |
| 1.1632 | B.120 | C.8 |
| 1.1633 | B.121 | C.8 |
| 1.1634 | B.122 | C.8 |
| 1.1635 | B.123 | C.8 |
| 1.1636 | B.124 | C.8 |
| 1.1637 | B.125 | C.8 |
| 1.1638 | B.126 | C.8 |
| 1.1639 | B.127 | C.8 |
| 1.1640 | B.128 | C.8 |
| 1.1641 | B.129 | C.8 |
| 1.1642 | B.130 | C.8 |
| 1.1643 | B.131 | C.8 |
| 1.1644 | B.132 | C.8 |
| 1.1645 | B.133 | C.8 |
| 1.1646 | B.134 | C.8 |
| 1.1647 | B.135 | C.8 |
| 1.1648 | B.136 | C.8 |
| 1.1649 | B.137 | C.8 |
| 1.1650 | B.138 | C.8 |
| 1.1651 | B.139 | C.8 |
| 1.1652 | B.140 | C.8 |
| 1.1653 | B.141 | C.8 |
| 1.1654 | B.142 | C.8 |
| 1.1655 | B.143 | C.8 |
| 1.1656 | B.144 | C.8 |
| 1.1657 | B.145 | C.8 |
| 1.1658 | B.146 | C.8 |
| 1.1659 | B.147 | C.8 |
| 1.1660 | B.148 | C.8 |
| 1.1661 | B.149 | C.8 |
| 1.1662 | B.150 | C.8 |
| 1.1663 | B.151 | C.8 |
| 1.1664 | B.152 | C.8 |
| 1.1665 | B.153 | C.8 |
| 1.1666 | B.154 | C.8 |
| 1.1667 | B.155 | C.8 |
| 1.1668 | B.156 | C.8 |
| 1.1669 | B.157 | C.8 |
| 1.1670 | B.158 | C.8 |
| 1.1671 | B.159 | C.8 |
| 1.1672 | B.160 | C.8 |
| 1.1673 | B.161 | C.8 |
| 1.1674 | B.162 | C.8 |
| 1.1675 | B.163 | C.8 |
| 1.1676 | B.164 | C.8 |
| 1.1677 | B.165 | C.8 |
| 1.1678 | B.166 | C.8 |
| 1.1679 | B.167 | C.8 |
| 1.1680 | B.168 | C.8 |
| 1.1681 | B.169 | C.8 |
| 1.1682 | B.170 | C.8 |
| 1.1683 | B.171 | C.8 |
| 1.1684 | B.172 | C.8 |
| 1.1685 | B.173 | C.8 |
| 1.1686 | B.174 | C.8 |
| 1.1687 | B.175 | C.8 |
| 1.1688 | B.176 | C.8 |
| 1.1689 | B.177 | C.8 |
| 1.1690 | B.178 | C.8 |
| 1.1691 | B.179 | C.8 |
| 1.1692 | B.180 | C.8 |
| 1.1693 | B.181 | C.8 |
| 1.1694 | B.182 | C.8 |
| 1.1695 | B.183 | C.8 |
| 1.1696 | B.184 | C.8 |
| 1.1697 | B.185 | C.8 |
| 1.1698 | B.186 | C.8 |
| 1.1699 | B.187 | C.8 |
| 1.1700 | B.188 | C.8 |
| 1.1701 | B.189 | C.8 |
| 1.1702 | B.1 | C.9 |
| 1.1703 | B.2 | C.9 |
| 1.1704 | B.3 | C.9 |
| 1.1705 | B.4 | C.9 |
| 1.1706 | B.5 | C.9 |
| 1.1707 | B.6 | C.9 |
| 1.1708 | B.7 | C.9 |
| 1.1709 | B.8 | C.9 |
| 1.1710 | B.9 | C.9 |
| 1.1711 | B.10 | C.9 |
| 1.1712 | B.11 | C.9 |
| 1.1713 | B.12 | C.9 |
| 1.1714 | B.13 | C.9 |
| 1.1715 | B.14 | C.9 |
| 1.1716 | B.15 | C.9 |
| 1.1717 | B.16 | C.9 |
| 1.1718 | B.17 | C.9 |
| 1.1719 | B.18 | C.9 |
| 1.1720 | B.19 | C.9 |
| 1.1721 | B.20 | C.9 |
| 1.1722 | B.21 | C.9 |
| 1.1723 | B.22 | C.9 |
| 1.1724 | B.23 | C.9 |
| 1.1725 | B.24 | C.9 |
| 1.1726 | B.25 | C.9 |
| 1.1727 | B.26 | C.9 |
| 1.1728 | B.27 | C.9 |
| 1.1729 | B.28 | C.9 |
| 1.1730 | B.29 | C.9 |
| 1.1731 | B.30 | C.9 |
| 1.1732 | B.31 | C.9 |
| 1.1733 | B.32 | C.9 |
| 1.1734 | B.33 | C.9 |
| 1.1735 | B.34 | C.9 |
| 1.1736 | B.35 | C.9 |
| 1.1737 | B.36 | C.9 |
| 1.1738 | B.37 | C.9 |
| 1.1739 | B.38 | C.9 |
| 1.1740 | B.39 | C.9 |
| 1.1741 | B.40 | C.9 |
| 1.1742 | B.41 | C.9 |
| 1.1743 | B.42 | C.9 |
| 1.1744 | B.43 | C.9 |
| 1.1745 | B.44 | C.9 |
| 1.1746 | B.45 | C.9 |
| 1.1747 | B.46 | C.9 |
| 1.1748 | B.47 | C.9 |
| 1.1749 | B.48 | C.9 |
| 1.1750 | B.49 | C.9 |
| 1.1751 | B.50 | C.9 |
| 1.1752 | B.51 | C.9 |
| 1.1753 | B.52 | C.9 |
| 1.1754 | B.53 | C.9 |
| 1.1755 | B.54 | C.9 |
| 1.1756 | B.55 | C.9 |
| 1.1757 | B.56 | C.9 |
| 1.1758 | B.57 | C.9 |
| 1.1759 | B.58. | C.9 |
| 1.1760 | B.59 | C.9 |
| 1.1761 | B.60 | C.9 |
| 1.1762 | B.61 | C.9 |
| 1.1763 | B.62 | C.9 |
| 1.1764 | B.63 | C.9 |
| 1.1765 | B.64 | C.9 |
| 1.1766 | B.65 | C.9 |
| 1.1767 | B.66 | C.9 |
| 1.1768 | B.67 | C.9 |
| 1.1769 | B.68 | C.9 |
| 1.1770 | B.69 | C.9 |
| 1.1771 | B.70 | C.9 |
| 1.1772 | B.71 | C.9 |
| 1.1773 | B.72 | C.9 |
| 1.1774 | B.73 | C.9 |
| 1.1775 | B.74 | C.9 |
| 1.1776 | B.75 | C.9 |
| 1.1777 | B.76 | C.9 |
| 1.1778 | B.77 | C.9 |
| 1.1779 | B.78 | C.9 |
| 1.1780 | B.79 | C.9 |
| 1.1781 | B.80 | C.9 |
| 1.1782 | B.81 | C.9 |
| 1.1783 | B.82 | C.9 |
| 1.1784 | B.83 | C.9 |
| 1.1785 | B.84 | C.9 |
| 1.1786 | B.85 | C.9 |
| 1.1787 | B.86 | C.9 |
| 1.1788 | B.87 | C.9 |
| 1.1789 | B.88 | C.9 |
| 1.1790 | B.89 | C.9 |
| 1.1791 | B.90 | C.9 |
| 1.1792 | B.91 | C.9 |
| 1.1793 | B.92 | C.9 |
| 1.1794 | B.93 | C.9 |
| 1.1795 | B.94 | C.9 |
| 1.1796 | B.95 | C.9 |
| 1.1797 | B.96 | C.9 |
| 1.1798 | B.97 | C.9 |
| 1.1799 | B.98 | C.9 |
| 1.1800 | B.99 | C.9 |
| 1.1801 | B.100 | C.9 |
| 1.1802 | B.101 | C.9 |
| 1.1803 | B.102 | C.9 |
| 1.1804 | B.103 | C.9 |
| 1.1805 | B.104 | C.9 |
| 1.1806 | B.105 | C.9 |
| 1.1807 | B.106 | C.9 |
| 1.1808 | B.107 | C.9 |
| 1.1809 | B.108 | C.9 |
| 1.1810 | B.109 | C.9 |
| 1.1811 | B.110 | C.9 |
| 1.1812 | B.111 | C.9 |
| 1.1813 | B.112 | C.9 |
| 1.1814 | B.113 | C.9 |
| 1.1815 | B.114 | C.9 |
| 1.1816 | B.115 | C.9 |
| 1.1817 | B.116 | C.9 |
| 1.1818 | B.117 | C.9 |
| 1.1819 | B.118 | C.9 |
| 1.1820 | B.119 | C.9 |
| 1.1821 | B.120 | C.9 |
| 1.1822 | B.121 | C.9 |
| 1.1823 | B.122 | C.9 |
| 1.1824 | B.123 | C.9 |
| 1.1825 | B.124 | C.9 |
| 1.1826 | B.125 | C.9 |
| 1.1827 | B.126 | C.9 |
| 1.1828 | B.127 | C.9 |
| 1.1829 | B.128 | C.9 |
| 1.1830 | B.129 | C.9 |
| 1.1831 | B.130 | C.9 |
| 1.1832 | B.131 | C.9 |
| 1.1833 | B.132 | C.9 |
| 1.1834 | B.133 | C.9 |
| 1.1835 | B.134 | C.9 |
| 1.1836 | B.135 | C.9 |
| 1.1837 | B.136 | C.9 |
| 1.1838 | B.137 | C.9 |
| 1.1839 | B.138 | C.9 |
| 1.1840 | B.139 | C.9 |
| 1.1841 | B.140 | C.9 |
| 1.1842 | B.141 | C.9 |
| 1.1843 | B.142 | C.9 |
| 1.1844 | B.143 | C.9 |
| 1.1845 | B.144 | C.9 |
| 1.1846 | B.145 | C.9 |
| 1.1847 | B.146 | C.9 |
| 1.1848 | B.147 | C.9 |
| 1.1849 | B.148 | C.9 |
| 1.1850 | B.149 | C.9 |
| 1.1851 | B.150 | C.9 |
| 1.1852 | B.151 | C.9 |
| 1.1853 | B.152 | C.9 |
| 1.1854 | B.153 | C.9 |
| 1.1855 | B.154 | C.9 |
| 1.1856 | B.155 | C.9 |
| 1.1857 | B.156 | C.9 |
| 1.1858 | B.157 | C.9 |
| 1.1859 | B.158 | C.9 |
| 1.1860 | B.159 | C.9 |
| 1.1861 | B.160 | C.9 |
| 1.1862 | B.161 | C.9 |
| 1.1863 | B.162 | C.9 |
| 1.1864 | B.163 | C.9 |
| 1.1865 | B.164 | C.9 |
| 1.1866 | B.165 | C.9 |
| 1.1867 | B.166 | C.9 |
| 1.1868 | B.167 | C.9 |
| 1.1869 | B.168 | C.9 |
| 1.1870 | B.169 | C.9 |
| 1.1871 | B.170 | C.9 |
| 1.1872 | B.171 | C.9 |
| 1.1873 | B.172 | C.9 |
| 1.1874 | B.173 | C.9 |
| 1.1875 | B.174 | C.9 |
| 1.1876 | B.175 | C.9 |
| 1.1877 | B.176 | C.9 |
| 1.1878 | B.177 | C.9 |
| 1.1879 | B.178 | C.9 |
| 1.1880 | B.179 | C.9 |
| 1.1881 | B.180 | C.9 |
| 1.1882 | B.181 | C.9 |
| 1.1883 | B.182 | C.9 |
| 1.1884 | B.183 | C.9 |
| 1.1885 | B.184 | C.9 |
| 1.1886 | B.185 | C.9 |
| 1.1887 | B.186 | C.9 |
| 1.1888 | B.187 | C.9 |
| 1.1889 | B.188 | C.9 |
| 1.1890 | B.189 | C.9 |
| 1.1891 | B.1 | C.10 |
| 1.1892 | B.2 | C.10 |
| 1.1893 | B.3 | C.10 |
| 1.1894 | B.4 | C.10 |
| 1.1895 | B.5 | C.10 |
| 1.1896 | B.6 | C.10 |
| 1.1897 | B.7 | C.10 |
| 1.1898 | B.8 | C.10 |
| 1.1899 | B.9 | C.10 |
| 1.1900 | B.10 | C.10 |
| 1.1901 | B.11 | C.10 |
| 1.1902 | B.12 | C.10 |
| 1.1903 | B.13 | C.10 |
| 1.1904 | B.14 | C.10 |
| 1.1905 | B.15 | C.10 |
| 1.1906 | B.16 | C.10 |
| 1.1907 | B.17 | C.10 |
| 1.1908 | B.18 | C.10 |
| 1.1909 | B.19 | C.10 |
| 1.1910 | B.20 | C.10 |
| 1.1911 | B.21 | C.10 |
| 1.1912 | B.22 | C.10 |
| 1.1913 | B.23 | C.10 |
| 1.1914 | B.24 | C.10 |
| 1.1915 | B.25 | C.10 |
| 1.1916 | B.26 | C.10 |
| 1.1917 | B.27 | C.10 |
| 1.1918 | B.28 | C.10 |
| 1.1919 | B.29 | C.10 |
| 1.1920 | B.30 | C.10 |
| 1.1921 | B.31 | C.10 |
| 1.1922 | B.32 | C.10 |
| 1.1923 | B.33 | C.10 |
| 1.1924 | B.34 | C.10 |
| 1.1925 | B.35 | C.10 |
| 1.1926 | B.36 | C.10 |
| 1.1927 | B.37 | C.10 |
| 1.1928 | B.38 | C.10 |
| 1.1929 | B.39 | C.10 |
| 1.1930 | B.40 | C.10 |
| 1.1931 | B.41 | C.10 |
| 1.1933 | B.43 | C.10 |
| 1.1934 | B.44 | C.10 |
| 1.1935 | B.45 | C.10 |
| 1.1936 | B.46 | C.10 |
| 1.1937 | B.47 | C.10 |
| 1.1938 | B.48 | C.10 |
| 1.1939 | B.49 | C.10 |
| 1.1940 | B.50 | C.10 |
| 1.1941 | B.51 | C.10 |
| 1.1942 | B.52 | C.10 |
| 1.1943 | B.53 | C.10 |
| 1.1944 | B.54 | C.10 |
| 1.1945 | B.55 | C.10 |
| 1.1946 | B.56 | C.10 |
| 1.1947 | B.57 | C.10 |
| 1.1948 | B.58. | C.10 |
| 1.1949 | B.59 | C.10 |
| 1.1950 | B.60 | C.10 |
| 1.1951 | B.61 | C.10 |
| 1.1952 | B.62 | C.10 |
| 1.1953 | B.63 | C.10 |
| 1.1954 | B.64 | C.10 |
| 1.1955 | B.65 | C.10 |
| 1.1956 | B.66 | C.10 |
| 1.1957 | B.67 | C.10 |
| 1.1958 | B.68 | C.10 |
| 1.1959 | B.69 | C.10 |
| 1.1960 | B.70 | C.10 |
| 1.1961 | B.71 | C.10 |
| 1.1962 | B.72 | C.10 |
| 1.1963 | B.73 | C.10 |
| 1.1964 | B.74 | C.10 |
| 1.1965 | B.75 | C.10 |
| 1.1966 | B.76 | C.10 |
| 1.1967 | B.77 | C.10 |
| 1.1968 | B.78 | C.10 |
| 1.1969 | B.79 | C.10 |
| 1.1970 | B.80 | C.10 |
| 1.1971 | B.81 | C.10 |
| 1.1972 | B.82 | C.10 |
| 1.1973 | B.83 | C.10 |
| 1.1974 | B.84 | C.10 |
| 1.1975 | B.85 | C.10 |
| 1.1976 | B.86 | C.10 |
| 1.1977 | B.87 | C.10 |
| 1.1978 | B.88 | C.10 |
| 1.1979 | B.89 | C.10 |
| 1.1980 | B.90 | C.10 |
| 1.1981 | B.91 | C.10 |
| 1.1982 | B.92 | C.10 |
| 1.1983 | B.93 | C.10 |
| 1.1984 | B.94 | C.10 |
| 1.1985 | B.95 | C.10 |
| 1.1986 | B.96 | C.10 |
| 1.1987 | B.97 | C.10 |
| 1.1988 | B.98 | C.10 |
| 1.1989 | B.99 | C.10 |
| 1.1990 | B.100 | C.10 |
| 1.1991 | B.101 | C.10 |
| 1.1992 | B.102 | C.10 |
| 1.1993 | B.103 | C.10 |
| 1.1994 | B.104 | C.10 |
| 1.1995 | B.105 | C.10 |
| 1.1996 | B.106 | C.10 |
| 1.1997 | B.107 | C.10 |
| 1.1998 | B.108 | C.10 |
| 1.1999 | B.109 | C.10 |
| 1.2000 | B.110 | C.10 |
| 1.2001 | B.111 | C.10 |
| 1.2002 | B.112 | C.10 |
| 1.2003 | B.113 | C.10 |
| 1.2004 | B.114 | C.10 |
| 1.2005 | B.115 | C.10 |
| 1.2006 | B.116 | C.10 |
| 1.2007 | B.117 | C.10 |
| 1.2008 | B.118 | C.10 |
| 1.2009 | B.119 | C.10 |
| 1.2010 | B.120 | C.10 |
| 1.2011 | B.121 | C.10 |
| 1.2012 | B.122 | C.10 |
| 1.2013 | B.123 | C.10 |
| 1.2014 | B.124 | C.10 |
| 1.2015 | B.125 | C.10 |
| 1.2016 | B.126 | C.10 |
| 1.2017 | B.127 | C.10 |
| 1.2018 | B.128 | C.10 |
| 1.2019 | B.129 | C.10 |
| 1.2020 | B.130 | C.10 |
| 1.2021 | B.131 | C.10 |
| 1.2022 | B.132 | C.10 |
| 1.2023 | B.133 | C.10 |
| 1.2024 | B.134 | C.10 |
| 1.2025 | B.135 | C.10 |
| 1.2026 | B.136 | C.10 |
| 1.2027 | B.137 | C.10 |
| 1.2028 | B.138 | C.10 |
| 1.2029 | B.139 | C.10 |
| 1.2030 | B.140 | C.10 |
| 1.2031 | B.141 | C.10 |
| 1.2032 | B.142 | C.10 |
| 1.2033 | B.143 | C.10 |
| 1.2034 | B.144 | C.10 |
| 1.2035 | B.145 | C.10 |
| 1.2036 | B.146 | C.10 |
| 1.2037 | B.147 | C.10 |
| 1.2038 | B.148 | C.10 |
| 1.2039 | B.149 | C.10 |
| 1.2040 | B.150 | C.10 |
| 1.2041 | B.151 | C.10 |
| 1.2042 | B.152 | C.10 |
| 1.2043 | B.153 | C.10 |
| 1.2044 | B.154 | C.10 |
| 1.2045 | B.155 | C.10 |
| 1.2046 | B.156 | C.10 |
| 1.2047 | B.157 | C.10 |
| 1.2048 | B.158 | C.10 |
| 1.2049 | B.159 | C.10 |
| 1.2050 | B.160 | C.10 |
| 1.2051 | B.161 | C.10 |
| 1.2052 | B.162 | C.10 |
| 1.2053 | B.163 | C.10 |
| 1.2054 | B.164 | C.10 |
| 1.2055 | B.165 | C.10 |
| 1.2056 | B.166 | C.10 |
| 1.2057 | B.167 | C.10 |
| 1.2058 | B.168 | C.10 |
| 1.2059 | B.169 | C.10 |
| 1.2060 | B.170 | C.10 |
| 1.2061 | B.171 | C.10 |
| 1.2062 | B.172 | C.10 |
| 1.2063 | B.173 | C.10 |
| 1.2064 | B.174 | C.10 |
| 1.2065 | B.175 | C.10 |
| 1.2066 | B.176 | C.10 |
| 1.2067 | B.177 | C.10 |
| 1.2068 | B.178 | C.10 |
| 1.2069 | B.179 | C.10 |
| 1.2070 | B.180 | C.10 |
| 1.2071 | B.181 | C.10 |
| 1.2072 | B.182 | C.10 |
| 1.2073 | B.183 | C.10 |
| 1.2074 | B.184 | C.10 |
| 1.2075 | B.185 | C.10 |
| 1.2076 | B.186 | C.10 |
| 1.2077 | B.187 | C.10 |
| 1.2078 | B.188 | C.10 |
| 1.2079 | B.189 | C.10 |
| 1.2080 | B.1 | C.11 |
| 1.2081 | B.2 | C.11 |
| 1.2082 | B.3 | C.11 |
| 1.2083 | B.4 | C.11 |
| 1.2084 | B.5 | C.11 |
| 1.2085 | B.6 | C.11 |
| 1.2086 | B.7 | C.11 |
| 1.2087 | B.8 | C.11 |
| 1.2088 | B.9 | C.11 |
| 1.2089 | B.10 | C.11 |
| 1.2090 | B.11 | C.11 |
| 1.2091 | B.12 | C.11 |
| 1.2092 | B.13 | C.11 |
| 1.2093 | B.14 | C.11 |
| 1.2094 | B.15 | C.11 |
| 1.2095 | B.16 | C.11 |
| 1.2096 | B.17 | C.11 |
| 1.2097 | B.18 | C.11 |
| 1.2098 | B.19 | C.11 |
| 1.2099 | B.20 | C.11 |
| 1.2100 | B.21 | C.11 |
| 1.2101 | B.22 | C.11 |
| 1.2102 | B.23 | C.11 |
| 1.2103 | B.24 | C.11 |
| 1.2104 | B.25 | C.11 |
| 1.2105 | B.26 | C.11 |
| 1.2106 | B.27 | C.11 |
| 1.2107 | B.28 | C.11 |
| 1.2108 | B.29 | C.11 |
| 1.2109 | B.30 | C.11 |
| 1.2110 | B.31 | C.11 |
| 1.2111 | B.32 | C.11 |
| 1.2112 | B.33 | C.11 |
| 1.2113 | B.34 | C.11 |
| 1.2114 | B.35 | C.11 |
| 1.2115 | B.36 | C.11 |
| 1.2116 | B.37 | C.11 |
| 1.2117 | B.38 | C.11 |
| 1.2118 | B.39 | C.11 |
| 1.2119 | B.40 | C.11 |
| 1.2120 | B.41 | C.11 |
| 1.2121 | B.42 | C.11 |
| 1.2122 | B.43 | C.11 |
| 1.2123 | B.44 | C.11 |
| 1.2124 | B.45 | C.11 |
| 1.2125 | B.46 | C.11 |
| 1.2126 | B.47 | C.11 |
| 1.2127 | B.48 | C.11 |
| 1.2128 | B.49 | C.11 |
| 1.2129 | B.50 | C.11 |
| 1.2130 | B.51 | C.11 |
| 1.2131 | B.52 | C.11 |
| 1.2132 | B.53 | C.11 |
| 1.2133 | B.54 | C.11 |
| 1.2134 | B.55 | C.11 |
| 1.2135 | B.56 | C.11 |
| 1.2136 | B.57 | C.11 |
| 1.2137 | B.58. | C.11 |
| 1.2138 | B.59 | C.11 |
| 1.2139 | B.60 | C.11 |
| 1.2140 | B.61 | C.11 |
| 1.2141 | B.62 | C.11 |
| 1.2142 | B.63 | C.11 |
| 1.2143 | B.64 | C.11 |
| 1.2144 | B.65 | C.11 |
| 1.2145 | B.66 | C.11 |
| 1.2146 | B.67 | C.11 |
| 1.2147 | B.68 | C.11 |
| 1.2148 | B.69 | C.11 |
| 1.2149 | B.70 | C.11 |
| 1.2150 | B.71 | C.11 |
| 1.2151 | B.72 | C.11 |
| 1.2152 | B.73 | C.11 |
| 1.2153 | B.74 | C.11 |
| 1.2154 | B.75 | C.11 |
| 1.2155 | B.76 | C.11 |
| 1.2156 | B.77 | C.11 |
| 1.2157 | B.78 | C.11 |
| 1.2158 | B.79 | C.11 |
| 1.2159 | B.80 | C.11 |
| 1.2160 | B.81 | C.11 |
| 1.2161 | B.82 | C.11 |
| 1.2162 | B.83 | C.11 |
| 1.2163 | B.84 | C.11 |
| 1.2164 | B.85 | C.11 |
| 1.2165 | B.86 | C.11 |
| 1.2166 | B.87 | C.11 |
| 1.2167 | B.88 | C.11 |
| 1.2168 | B.89 | C.11 |
| 1.2169 | B.90 | C.11 |
| 1.2170 | B.91 | C.11 |
| 1.2171 | B.92 | C.11 |
| 1.2172 | B.93 | C.11 |
| 1.2173 | B.94 | C.11 |
| 1.2174 | B.95 | C.11 |
| 1.2175 | B.96 | C.11 |
| 1.2176 | B.97 | C.11 |
| 1.2177 | B.98 | C.11 |
| 1.2178 | B.99 | C.11 |
| 1.2179 | B.100 | C.11 |
| 1.2180 | B.101 | C.11 |
| 1.2181 | B.102 | C.11 |
| 1.2182 | B.103 | C.11 |
| 1.2183 | B.104 | C.11 |
| 1.2184 | B.105 | C.11 |
| 1.2185 | B.106 | C.11 |
| 1.2186 | B.107 | C.11 |
| 1.2187 | B.108 | C.11 |
| 1.2188 | B.109 | C.11 |
| 1.2189 | B.110 | C.11 |
| 1.2190 | B.111 | C.11 |
| 1.2191 | B.112 | C.11 |
| 1.2192 | B.113 | C.11 |
| 1.2193 | B.114 | C.11 |
| 1.2194 | B.115 | C.11 |
| 1.2195 | B.116 | C.11 |
| 1.2196 | B.117 | C.11 |
| 1.2197 | B.118 | C.11 |
| 1.2198 | B.119 | C.11 |
| 1.2199 | B.120 | C.11 |
| 1.2200 | B.121 | C.11 |
| 1.2201 | B.122 | C.11 |
| 1.2202 | B.123 | C.11 |
| 1.2203 | B.124 | C.11 |
| 1.2204 | B.125 | C.11 |
| 1.2205 | B.126 | C.11 |
| 1.2206 | B.127 | C.11 |
| 1.2207 | B.128 | C.11 |
| 1.2208 | B.129 | C.11 |
| 1.2209 | B.130 | C.11 |
| 1.2210 | B.131 | C.11 |
| 1.2211 | B.132 | C.11 |
| 1.2212 | B.133 | C.11 |
| 1.2213 | B.134 | C.11 |
| 1.2214 | B.135 | C.11 |
| 1.2215 | B.136 | C.11 |
| 1.2216 | B.137 | C.11 |
| 1.2217 | B.138 | C.11 |
| 1.2218 | B.139 | C.11 |
| 1.2219 | B.140 | C.11 |
| 1.2220 | B.141 | C.11 |
| 1.2221 | B.142 | C.11 |
| 1.2222 | B.143 | C.11 |
| 1.2223 | B.144 | C.11 |
| 1.2224 | B.145 | C.11 |
| 1.2225 | B.146 | C.11 |
| 1.2226 | B.147 | C.11 |
| 1.2227 | B.148 | C.11 |
| 1.2228 | B.149 | C.11 |
| 1.2229 | B.150 | C.11 |
| 1.2230 | B.151 | C.11 |
| 1.2231 | B.152 | C.11 |
| 1.2232 | B.153 | C.11 |
| 1.2233 | B.154 | C.11 |
| 1.2234 | B.155 | C.11 |
| 1.2235 | B.156 | C.11 |
| 1.2236 | B.157 | C.11 |
| 1.2237 | B.158 | C.11 |
| 1.2238 | B.159 | C.11 |
| 1.2239 | B.160 | C.11 |
| 1.2240 | B.161 | C.11 |
| 1.2241 | B.162 | C.11 |
| 1.2242 | B.163 | C.11 |
| 1.2243 | B.164 | C.11 |
| 1.2244 | B.165 | C.11 |
| 1.2245 | B.166 | C.11 |
| 1.2246 | B.167 | C.11 |
| 1.2247 | B.168 | C.11 |
| 1.2248 | B.169 | C.11 |
| 1.2249 | B.170 | C.11 |
| 1.2250 | B.171 | C.11 |
| 1.2251 | B.172 | C.11 |
| 1.2252 | B.173 | C.11 |
| 1.2253 | B.174 | C.11 |
| 1.2254 | B.175 | C.11 |
| 1.2255 | B.176 | C.11 |
| 1.2256 | B.177 | C.11 |
| 1.2257 | B.178 | C.11 |
| 1.2258 | B.179 | C.11 |
| 1.2259 | B.180 | C.11 |
| 1.2260 | B.181 | C.11 |
| 1.2261 | B.182 | C.11 |
| 1.2262 | B.183 | C.11 |
| 1.2263 | B.184 | C.11 |
| 1.2264 | B.185 | C.11 |
| 1.2265 | B.186 | C.11 |
| 1.2266 | B.187 | C.11 |
| 1.2267 | B.188 | C.11 |
| 1.2268 | B.189 | C.11 |
| 1.2269 | B.1 | C.12 |
| 1.2270 | B.2 | C.12 |
| 1.2271 | B.3 | C.12 |
| 1.2272 | B.4 | C.12 |
| 1.2273 | B.5 | C.12 |
| 1.2274 | B.6 | C.12 |
| 1.2275 | B.7 | C.12 |
| 1.2276 | B.8 | C.12 |
| 1.2277 | B.9 | C.12 |
| 1.2278 | B.10 | C.12 |
| 1.2279 | B.11 | C.12 |
| 1.2280 | B.12 | C.12 |
| 1.2281 | B.13 | C.12 |
| 1.2282 | B.14 | C.12 |
| 1.2283 | B.15 | C.12 |
| 1.2284 | B.16 | C.12 |
| 1.2285 | B.17 | C.12 |
| 1.2286 | B.18 | C.12 |
| 1.2287 | B.19 | C.12 |
| 1.2288 | B.20 | C.12 |
| 1.2289 | B.21 | C.12 |
| 1.2290 | B.22 | C.12 |
| 1.2291 | B.23 | C.12 |
| 1.2292 | B.24 | C.12 |
| 1.2293 | B.25 | C.12 |
| 1.2294 | B.26 | C.12 |
| 1.2295 | B.27 | C.12 |
| 1.2296 | B.28 | C.12 |
| 1.2297 | B.29 | C.12 |
| 1.2298 | B.30 | C.12 |
| 1.2299 | B.31 | C.12 |
| 1.2300 | B.32 | C.12 |
| 1.2301 | B.33 | C.12 |
| 1.2302 | B.34 | C.12 |
| 1.2303 | B.35 | C.12 |
| 1.2304 | B.36 | C.12 |
| 1.2305 | B.37 | C.12 |
| 1.2306 | B.38 | C.12 |
| 1.2307 | B.39 | C.12 |
| 1.2308 | B.40 | C.12 |
| 1.2309 | B.41 | C.12 |
| 1.2310 | B.42 | C.12 |
| 1.2311 | B.43 | C.12 |
| 1.2312 | B.44 | C.12 |
| 1.2313 | B.45 | C.12 |
| 1.2314 | B.46 | C.12 |
| 1.2315 | B.47 | C.12 |
| 1.2316 | B.48 | C.12 |
| 1.2317 | B.49 | C.12 |
| 1.2318 | B.50 | C.12 |
| 1.2319 | B.51 | C.12 |
| 1.2320 | B.52 | C.12 |
| 1.2321 | B.53 | C.12 |
| 1.2322 | B.54 | C.12 |
| 1.2323 | B.55 | C.12 |
| 1.2324 | B.56 | C.12 |
| 1.2325 | B.57 | C.12 |
| 1.2326 | B.58. | C.12 |
| 1.2327 | B.59 | C.12 |
| 1.2328 | B.60 | C.12 |
| 1.2329 | B.61 | C.12 |
| 1.2330 | B.62 | C.12 |
| 1.2331 | B.63 | C.12 |
| 1.2332 | B.64 | C.12 |
| 1.2333 | B.65 | C.12 |
| 1.2334 | B.66 | C.12 |
| 1.2335 | B.67 | C.12 |
| 1.2336 | B.68 | C.12 |
| 1.2337 | B.69 | C.12 |
| 1.2338 | B.70 | C.12 |
| 1.2339 | B.71 | C.12 |
| 1.2340 | B.72 | C.12 |
| 1.2341 | B.73 | C.12 |
| 1.2342 | B.74 | C.12 |
| 1.2343 | B.75 | C.12 |
| 1.2344 | B.76 | C.12 |
| 1.2345 | B.77 | C.12 |
| 1.2346 | B.78 | C.12 |
| 1.2347 | B.79 | C.12 |
| 1.2348 | B.80 | C.12 |
| 1.2349 | B.81 | C.12 |
| 1.2350 | B.82 | C.12 |
| 1.2351 | B.83 | C.12 |
| 1.2352 | B.84 | C.12 |
| 1.2353 | B.85 | C.12 |
| 1.2354 | B.86 | C.12 |
| 1.2355 | B.87 | C.12 |
| 1.2356 | B.88 | C.12 |
| 1.2357 | B.89 | C.12 |
| 1.2358 | B.90 | C.12 |
| 1.2359 | B.91 | C.12 |
| 1.2360 | B.92 | C.12 |
| 1.2361 | B.93 | C.12 |
| 1.2362 | B.94 | C.12 |
| 1.2363 | B.95 | C.12 |
| 1.2364 | B.96 | C.12 |
| 1.2365 | B.97 | C.12 |
| 1.2366 | B.98 | C.12 |
| 1.2367 | B.99 | C.12 |
| 1.2368 | B.100 | C.12 |
| 1.2369 | B.101 | C.12 |
| 1.2370 | B.102 | C.12 |
| 1.2371 | B.103 | C.12 |
| 1.2372 | B.104 | C.12 |
| 1.2373 | B.105 | C.12 |
| 1.2374 | B.106 | C.12 |
| 1.2375 | B.107 | C.12 |
| 1.2376 | B.108 | C.12 |
| 1.2377 | B.109 | C.12 |
| 1.2378 | B.110 | C.12 |
| 1.2379 | B.111 | C.12 |
| 1.2380 | B.112 | C.12 |
| 1.2381 | B.113 | C.12 |
| 1.2382 | B.114 | C.12 |
| 1.2383 | B.115 | C.12 |
| 1.2384 | B.116 | C.12 |
| 1.2385 | B.117 | C.12 |
| 1.2386 | B.118 | C.12 |
| 1.2387 | B.119 | C.12 |
| 1.2388 | B.120 | C.12 |
| 1.2389 | B.121 | C.12 |
| 1.2390 | B.122 | C.12 |
| 1.2391 | B.123 | C.12 |
| 1.2392 | B.124 | C.12 |
| 1.2393 | B.125 | C.12 |
| 1.2394 | B.126 | C.12 |
| 1.2395 | B.127 | C.12 |
| 1.2396 | B.128 | C.12 |
| 1.2397 | B.129 | C.12 |
| 1.2398 | B.130 | C.12 |
| 1.2399 | B.131 | C.12 |
| 1.2400 | B.132 | C.12 |
| 1.2401 | B.133 | C.12 |
| 1.2402 | B.134 | C.12 |
| 1.2403 | B.135 | C.12 |
| 1.2404 | B.136 | C.12 |
| 1.2405 | B.137 | C.12 |
| 1.2406 | B.138 | C.12 |
| 1.2407 | B.139 | C.12 |
| 1.2408 | B.140 | C.12 |
| 1.2409 | B.141 | C.12 |
| 1.2410 | B.142 | C.12 |
| 1.2411 | B.143 | C.12 |
| 1.2412 | B.144 | C.12 |
| 1.2413 | B.145 | C.12 |
| 1.2414 | B.146 | C.12 |
| 1.2415 | B.147 | C.12 |
| 1.2416 | B.148 | C.12 |
| 1.2417 | B.149 | C.12 |
| 1.2418 | B.150 | C.12 |
| 1.2419 | B.151 | C.12 |
| 1.2420 | B.152 | C.12 |
| 1.2421 | B.153 | C.12 |
| 1.2422 | B.154 | C.12 |
| 1.2423 | B.155 | C.12 |
| 1.2424 | B.156 | C.12 |
| 1.2425 | B.157 | C.12 |
| 1.2426 | B.158 | C.12 |
| 1.2427 | B.159 | C.12 |
| 1.2428 | B.160 | C.12 |
| 1.2429 | B.161 | C.12 |
| 1.2430 | B.162 | C.12 |
| 1.2431 | B.163 | C.12 |
| 1.2432 | B.164 | C.12 |
| 1.2433 | B.165 | C.12 |
| 1.2434 | B.166 | C.12 |
| 1.2435 | B.167 | C.12 |
| 1.2436 | B.168 | C.12 |
| 1.2437 | B.169 | C.12 |
| 1.2438 | B.170 | C.12 |
| 1.2439 | B.171 | C.12 |
| 1.2440 | B.172 | C.12 |
| 1.2441 | B.173 | C.12 |
| 1.2442 | B.174 | C.12 |
| 1.2443 | B.175 | C.12 |
| 1.2444 | B.176 | C.12 |
| 1.2445 | B.177 | C.12 |
| 1.2446 | B.178 | C.12 |
| 1.2447 | B.179 | C.12 |
| 1.2448 | B.180 | C.12 |
| 1.2449 | B.181 | C.12 |
| 1.2450 | B.182 | C.12 |
| 1.2451 | B.183 | C.12 |
| 1.2452 | B.184 | C.12 |
| 1.2453 | B.185 | C.12 |
| 1.2454 | B.186 | C.12 |
| 1.2455 | B.187 | C.12 |
| 1.2456 | B.188 | C.12 |
| 1.2457 | B.189 | C.12 |
| 1.2458 | B.1 | C.13 |
| 1.2459 | B.2 | C.13 |
| 1.2460 | B.3 | C.13 |
| 1.2461 | B.4 | C.13 |
| 1.2462 | B.5 | C.13 |
| 1.2463 | B.6 | C.13 |
| 1.2464 | B.7 | C.13 |
| 1.2465 | B.8 | C.13 |
| 1.2466 | B.9 | C.13 |
| 1.2467 | B.10 | C.13 |
| 1.2468 | B.11 | C.13 |
| 1.2469 | B.12 | C.13 |
| 1.2470 | B.13 | C.13 |
| 1.2471 | B.14 | C.13 |
| 1.2472 | B.15 | C.13 |
| 1.2473 | B.16 | C.13 |
| 1.2474 | B.17 | C.13 |
| 1.2475 | B.18 | C.13 |
| 1.2476 | B.19 | C.13 |
| 1.2477 | B.20 | C.13 |
| 1.2478 | B.21 | C.13 |
| 1.2479 | B.22 | C.13 |
| 1.2480 | B.23 | C.13 |
| 1.2481 | B.24 | C.13 |
| 1.2482 | B.25 | C.13 |
| 1.2483 | B.26 | C.13 |
| 1.2484 | B.27 | C.13 |
| 1.2485 | B.28 | C.13 |
| 1.2486 | B.29 | C.13 |
| 1.2487 | B.30 | C.13 |
| 1.2488 | B.31 | C.13 |
| 1.2489 | B.32 | C.13 |
| 1.2490 | B.33 | C.13 |
| 1.2491 | B.34 | C.13 |
| 1.2492 | B.35 | C.13 |
| 1.2493 | B.36 | C.13 |
| 1.2494 | B.37 | C.13 |
| 1.2495 | B.38 | C.13 |
| 1.2496 | B.39 | C.13 |
| 1.2497 | B.40 | C.13 |
| 1.2498 | B.41 | C.13 |
| 1.2499 | B.42 | C.13 |
| 1.2500 | B.43 | C.13 |
| 1.2501 | B.44 | C.13 |
| 1.2502 | B.45 | C.13 |
| 1.2503 | B.46 | C.13 |
| 1.2504 | B.47 | C.13 |
| 1.2505 | B.48 | C.13 |
| 1.2506 | B.49 | C.13 |
| 1.2507 | B.50 | C.13 |
| 1.2508 | B.51 | C.13 |
| 1.2509 | B.52 | C.13 |
| 1.2510 | B.53 | C.13 |
| 1.2511 | B.54 | C.13 |
| 1.2512 | B.55 | C.13 |
| 1.2513 | B.56 | C.13 |
| 1.2514 | B.57 | C.13 |
| 1.2515 | B.58. | C.13 |
| 1.2516 | B.59 | C.13 |
| 1.2517 | B.60 | C.13 |
| 1.2518 | B.61 | C.13 |
| 1.2519 | B.62 | C.13 |
| 1.2520 | B.63 | C.13 |
| 1.2521 | B.64 | C.13 |
| 1.2522 | B.65 | C.13 |
| 1.2523 | B.66 | C.13 |
| 1.2524 | B.67 | C.13 |
| 1.2525 | B.68 | C.13 |
| 1.2526 | B.69 | C.13 |
| 1.2527 | B.70 | C.13 |
| 1.2528 | B.71 | C.13 |
| 1.2529 | B.72 | C.13 |
| 1.2530 | B.73 | C.13 |
| 1.2531 | B.74 | C.13 |
| 1.2532 | B.75 | C.13 |
| 1.2533 | B.76 | C.13 |
| 1.2534 | B.77 | C.13 |
| 1.2535 | B.78 | C.13 |
| 1.2536 | B.79 | C.13 |
| 1.2537 | B.80 | C.13 |
| 1.2538 | B.81 | C.13 |
| 1.2539 | B.82 | C.13 |
| 1.2540 | B.83 | C.13 |
| 1.2541 | B.84 | C.13 |
| 1.2542 | B.85 | C.13 |
| 1.2543 | B.86 | C.13 |
| 1.2544 | B.87 | C.13 |
| 1.2545 | B.88 | C.13 |
| 1.2546 | B.89 | C.13 |
| 1.2547 | B.90 | C.13 |
| 1.2548 | B.91 | C.13 |
| 1.2549 | B.92 | C.13 |
| 1.2550 | B.93 | C.13 |
| 1.2551 | B.94 | C.13 |
| 1.2552 | B.95 | C.13 |
| 1.2553 | B.96 | C.13 |
| 1.2554 | B.97 | C.13 |
| 1.2555 | B.98 | C.13 |
| 1.2556 | B.99 | C.13 |
| 1.2557 | B.100 | C.13 |
| 1.2558 | B.101 | C.13 |
| 1.2559 | B.102 | C.13 |
| 1.2560 | B.103 | C.13 |
| 1.2561 | B.104 | C.13 |
| 1.2562 | B.105 | C.13 |
| 1.2563 | B.106 | C.13 |
| 1.2564 | B.107 | C.13 |
| 1.2565 | B.108 | C.13 |
| 1.2566 | B.109 | C.13 |
| 1.2567 | B.110 | C.13 |
| 1.2568 | B.111 | C.13 |
| 1.2569 | B.112 | C.13 |
| 1.2570 | B.113 | C.13 |
| 1.2571 | B.114 | C.13 |
| 1.2572 | B.115 | C.13 |
| 1.2573 | B.116 | C.13 |
| 1.2574 | B.117 | C.13 |
| 1.2575 | B.118 | C.13 |
| 1.2576 | B.119 | C.13 |
| 1.2577 | B.120 | C.13 |
| 1.2578 | B.121 | C.13 |
| 1.2579 | B.122 | C.13 |
| 1.2580 | B.123 | C.13 |
| 1.2581 | B.124 | C.13 |
| 1.2582 | B.125 | C.13 |
| 1.2583 | B.126 | C.13 |
| 1.2584 | B.127 | C.13 |
| 1.2585 | B.128 | C.13 |
| 1.2586 | B.129 | C.13 |
| 1.2587 | B.130 | C.13 |
| 1.2588 | B.131 | C.13 |
| 1.2589 | B.132 | C.13 |
| 1.2590 | B.133 | C.13 |
| 1.2591 | B.134 | C.13 |
| 1.2592 | B.135 | C.13 |
| 1.2593 | B.136 | C.13 |
| 1.2594 | B.137 | C.13 |
| 1.2595 | B.138 | C.13 |
| 1.2596 | B.139 | C.13 |
| 1.2597 | B.140 | C.13 |
| 1.2598 | B.141 | C.13 |
| 1.2599 | B.142 | C.13 |
| 1.2600 | B.143 | C.13 |
| 1.2601 | B.144 | C.13 |
| 1.2602 | B.145 | C.13 |
| 1.2603 | B.146 | C.13 |
| 1.2604 | B.147 | C.13 |
| 1.2605 | B.148 | C.13 |
| 1.2606 | B.149 | C.13 |
| 1.2607 | B.150 | C.13 |
| 1.2608 | B.151 | C.13 |
| 1.2609 | B.152 | C.13 |
| 1.2610 | B.153 | C.13 |
| 1.2611 | B.154 | C.13 |
| 1.2612 | B.155 | C.13 |
| 1.2613 | B.156 | C.13 |
| 1.2614 | B.157 | C.13 |
| 1.2615 | B.158 | C.13 |
| 1.2616 | B.159 | C.13 |
| 1.2617 | B.160 | C.13 |
| 1.2618 | B.161 | C.13 |
| 1.2619 | B.162 | C.13 |
| 1.2620 | B.163 | C.13 |
| 1.2621 | B.164 | C.13 |
| 1.2622 | B.165 | C.13 |
| 1.2623 | B.166 | C.13 |
| 1.2624 | B.167 | C.13 |
| 1.2625 | B.168 | C.13 |
| 1.2626 | B.169 | C.13 |
| 1.2627 | B.170 | C.13 |
| 1.2628 | B.171 | C.13 |
| 1.2629 | B.172 | C.13 |
| 1.2630 | B.173 | C.13 |
| 1.2631 | B.174 | C.13 |
| 1.2632 | B.175 | C.13 |
| 1.2633 | B.176 | C.13 |
| 1.2634 | B.177 | C.13 |
| 1.2635 | B.178 | C.13 |
| 1.2636 | B.179 | C.13 |
| 1.2637 | B.180 | C.13 |
| 1.2638 | B.181 | C.13 |
| 1.2639 | B.182 | C.13 |
| 1.2640 | B.183 | C.13 |
| 1.2641 | B.184 | C.13 |
| 1.2642 | B.185 | C.13 |
| 1.2643 | B.186 | C.13 |
| 1.2644 | B.187 | C.13 |
| 1.2645 | B.188 | C.13 |
| 1.2646 | B.189 | C.13 |
| 1.2647 | B.1 | C.14 |
| 1.2648 | B.2 | C.14 |
| 1.2649 | B.3 | C.14 |
| 1.2650 | B.4 | C.14 |
| 1.2651 | B.5 | C.14 |
| 1.2652 | B.6 | C.14 |
| 1.2653 | B.7 | C.14 |
| 1.2654 | B.8 | C.14 |
| 1.2655 | B.9 | C.14 |
| 1.2656 | B.10 | C.14 |
| 1.2657 | B.11 | C.14 |
| 1.2658 | B.12 | C.14 |
| 1.2659 | B.13 | C.14 |
| 1.2660 | B.14 | C.14 |
| 1.2661 | B.15 | C.14 |
| 1.2662 | B.16 | C.14 |
| 1.2663 | B.17 | C.14 |
| 1.2664 | B.18 | C.14 |
| 1.2665 | B.19 | C.14 |
| 1.2666 | B.20 | C.14 |
| 1.2667 | B.21 | C.14 |
| 1.2668 | B.22 | C.14 |
| 1.2669 | B.23 | C.14 |
| 1.2670 | B.24 | C.14 |
| 1.2671 | B.25 | C.14 |
| 1.2672 | B.26 | C.14 |
| 1.2673 | B.27 | C.14 |
| 1.2674 | B.28 | C.14 |
| 1.2675 | B.29 | C.14 |
| 1.2676 | B.30 | C.14 |
| 1.2677 | B.31 | C.14 |
| 1.2678 | B.32 | C.14 |
| 1.2679 | B.33 | C.14 |
| 1.2680 | B.34 | C.14 |
| 1.2681 | B.35 | C.14 |
| 1.2682 | B.36 | C.14 |
| 1.2683 | B.37 | C.14 |
| 1.2684 | B.38 | C.14 |
| 1.2685 | B.39 | C.14 |
| 1.2686 | B.40 | C.14 |
| 1.2687 | B.41 | C.14 |
| 1.2688 | B.42 | C.14 |
| 1.2689 | B.43 | C.14 |
| 1.2690 | B.44 | C.14 |
| 1.2691 | B.45 | C.14 |
| 1.2692 | B.46 | C.14 |
| 1.2693 | B.47 | C.14 |
| 1.2694 | B.48 | C.14 |
| 1.2695 | B.49 | C.14 |
| 1.2696 | B.50 | C.14 |
| 1.2697 | B.51 | C.14 |
| 1.2698 | B.52 | C.14 |
| 1.2699 | B.53 | C.14 |
| 1.2700 | B.54 | C.14 |
| 1.2701 | B.55 | C.14 |
| 1.2702 | B.56 | C.14 |
| 1.2703 | B.57 | C.14 |
| 1.2704 | B.58. | C.14 |
| 1.2705 | B.59 | C.14 |
| 1.2706 | B.60 | C.14 |
| 1.2707 | B.61 | C.14 |
| 1.2708 | B.62 | C.14 |
| 1.2709 | B.63 | C.14 |
| 1.2710 | B.64 | C.14 |
| 1.2711 | B.65 | C.14 |
| 1.2712 | B.66 | C.14 |
| 1.2713 | B.67 | C.14 |
| 1.2714 | B.68 | C.14 |
| 1.2715 | B.69 | C.14 |
| 1.2716 | B.70 | C.14 |
| 1.2717 | B.71 | C.14 |
| 1.2718 | B.72 | C.14 |
| 1.2719 | B.73 | C.14 |
| 1.2720 | B.74 | C.14 |
| 1.2721 | B.75 | C.14 |
| 1.2722 | B.76 | C.14 |
| 1.2723 | B.77 | C.14 |
| 1.2724 | B.78 | C.14 |
| 1.2725 | B.79 | C.14 |
| 1.2726 | B.80 | C.14 |
| 1.2727 | B.81 | C.14 |
| 1.2728 | B.82 | C.14 |
| 1.2729 | B.83 | C.14 |
| 1.2730 | B.84 | C.14 |
| 1.2731 | B.85 | C.14 |
| 1.2732 | B.86 | C.14 |
| 1.2733 | B.87 | C.14 |
| 1.2734 | B.88 | C.14 |
| 1.2735 | B.89 | C.14 |
| 1.2736 | B.90 | C.14 |
| 1.2737 | B.91 | C.14 |
| 1.2738 | B.92 | C.14 |
| 1.2739 | B.93 | C.14 |
| 1.2740 | B.94 | C.14 |
| 1.2741 | B.95 | C.14 |
| 1.2742 | B.96 | C.14 |
| 1.2743 | B.97 | C.14 |
| 1.2744 | B.98 | C.14 |
| 1.2745 | B.99 | C.14 |
| 1.2746 | B.100 | C.14 |
| 1.2747 | B.101 | C.14 |
| 1.2748 | B.102 | C.14 |
| 1.2749 | B.103 | C.14 |
| 1.2750 | B.104 | C.14 |
| 1.2751 | B.105 | C.14 |
| 1.2752 | B.106 | C.14 |
| 1.2753 | B.107 | C.14 |
| 1.2754 | B.108 | C.14 |
| 1.2755 | B.109 | C.14 |
| 1.2756 | B.110 | C.14 |
| 1.2757 | B.111 | C.14 |
| 1.2758 | B.112 | C.14 |
| 1.2759 | B.113 | C.14 |
| 1.2760 | B.114 | C.14 |
| 1.2761 | B.115 | C.14 |
| 1.2762 | B.116 | C.14 |
| 1.2763 | B.117 | C.14 |
| 1.2764 | B.118 | C.14 |
| 1.2765 | B.119 | C.14 |
| 1.2766 | B.120 | C.14 |
| 1.2767 | B.121 | C.14 |
| 1.2768 | B.122 | C.14 |
| 1.2769 | B.123 | C.14 |
| 1.2770 | B.124 | C.14 |
| 1.2771 | B.125 | C.14 |
| 1.2772 | B.126 | C.14 |
| 1.2773 | B.127 | C.14 |
| 1.2774 | B.128 | C.14 |
| 1.2775 | B.129 | C.14 |
| 1.2776 | B.130 | C.14 |
| 1.2777 | B.131 | C.14 |
| 1.2778 | B.132 | C.14 |
| 1.2779 | B.133 | C.14 |
| 1.2780 | B.134 | C.14 |
| 1.2781 | B.135 | C.14 |
| 1.2782 | B.136 | C.14 |
| 1.2783 | B.137 | C.14 |
| 1.2784 | B.138 | C.14 |
| 1.2785 | B.139 | C.14 |
| 1.2786 | B.140 | C.14 |
| 1.2787 | B.141 | C.14 |
| 1.2788 | B.142 | C.14 |
| 1.2789 | B.143 | C.14 |
| 1.2790 | B.144 | C.14 |
| 1.2791 | B.145 | C.14 |
| 1.2792 | B.146 | C.14 |
| 1.2793 | B.147 | C.14 |
| 1.2794 | B.148 | C.14 |
| 1.2795 | B.149 | C.14 |
| 1.2796 | B.150 | C.14 |
| 1.2797 | B.151 | C.14 |
| 1.2798 | B.152 | C.14 |
| 1.2799 | B.153 | C.14 |
| 1.2800 | B.154 | C.14 |
| 1.2801 | B.155 | C.14 |
| 1.2802 | B.156 | C.14 |
| 1.2803 | B.157 | C.14 |
| 1.2804 | B.158 | C.14 |
| 1.2805 | B.159 | C.14 |
| 1.2806 | B.160 | C.14 |
| 1.2807 | B.161 | C.14 |
| 1.2808 | B.162 | C.14 |
| 1.2809 | B.163 | C.14 |
| 1.2810 | B.164 | C.14 |
| 1.2811 | B.165 | C.14 |
| 1.2812 | B.166 | C.14 |
| 1.2813 | B.167 | C.14 |
| 1.2814 | B.168 | C.14 |
| 1.2815 | B.169 | C.14 |
| 1.2816 | B.170 | C.14 |
| 1.2817 | B.171 | C.14 |
| 1.2818 | B.172 | C.14 |
| 1.2819 | B.173 | C.14 |
| 1.2820 | B.174 | C.14 |
| 1.2821 | B.175 | C.14 |
| 1.2822 | B.176 | C.14 |
| 1.2823 | B.177 | C.14 |
| 1.2824 | B.178 | C.14 |
| 1.2825 | B.179 | C.14 |
| 1.2826 | B.180 | C.14 |
| 1.2827 | B.181 | C.14 |
| 1.2828 | B.182 | C.14 |
| 1.2829 | B.183 | C.14 |
| 1.2830 | B.184 | C.14 |
| 1.2831 | B.185 | C.14 |
| 1.2832 | B.186 | C.14 |
| 1.2833 | B.187 | C.14 |
| 1.2834 | B.188 | C.14 |
| 1.2835 | B.189 | C.14 |
| 1.2836 | B.1 | C.15 |
| 1.2837 | B.2 | C.15 |
| 1.2838 | B.3 | C.15 |
| 1.2839 | B.4 | C.15 |
| 1.2840 | B.5 | C.15 |
| 1.2841 | B.6 | C.15 |
| 1.2842 | B.7 | C.15 |
| 1.2843 | B.8 | C.15 |
| 1.2844 | B.9 | C.15 |
| 1.2845 | B.10 | C.15 |
| 1.2846 | B.11 | C.15 |
| 1.2847 | B.12 | C.15 |
| 1.2848 | B.13 | C.15 |
| 1.2849 | B.14 | C.15 |
| 1.2850 | B.15 | C.15 |
| 1.2851 | B.16 | C.15 |
| 1.2852 | B.17 | C.15 |
| 1.2853 | B.18 | C.15 |
| 1.2854 | B.19 | C.15 |
| 1.2855 | B.20 | C.15 |
| 1.2856 | B.21 | C.15 |
| 1.2857 | B.22 | C.15 |
| 1.2858 | B.23 | C.15 |
| 1.2859 | B.24 | C.15 |
| 1.2860 | B.25 | C.15 |
| 1.2861 | B.26 | C.15 |
| 1.2862 | B.27 | C.15 |
| 1.2863 | B.28 | C.15 |
| 1.2864 | B.29 | C.15 |
| 1.2865 | B.30 | C.15 |
| 1.2866 | B.31 | C.15 |
| 1.2867 | B.32 | C.15 |
| 1.2868 | B.33 | C.15 |
| 1.2869 | B.34 | C.15 |
| 1.2870 | B.35 | C.15 |
| 1.2871 | B.36 | C.15 |
| 1.2872 | B.37 | C.15 |
| 1.2873 | B.38 | C.15 |
| 1.2874 | B.39 | C.15 |
| 1.2875 | B.40 | C.15 |
| 1.2876 | B.41 | C.15 |
| 1.2877 | B.42 | C.15 |
| 1.2878 | B.43 | C.15 |
| 1.2879 | B.44 | C.15 |
| 1.2880 | B.45 | C.15 |
| 1.2881 | B.46 | C.15 |
| 1.2882 | B.47 | C.15 |
| 1.2883 | B.48 | C.15 |
| 1.2884 | B.49 | C.15 |
| 1.2885 | B.50 | C.15 |
| 1.2886 | B.51 | C.15 |
| 1.2887 | B.52 | C.15 |
| 1.2888 | B.53 | C.15 |
| 1.2889 | B.54 | C.15 |
| 1.2890 | B.55 | C.15 |
| 1.2891 | B.56 | C.15 |
| 1.2892 | B.57 | C.15 |
| 1.2893 | B.58. | C.15 |
| 1.2894 | B.59 | C.15 |
| 1.2895 | B.60 | C.15 |
| 1.2896 | B.61 | C.15 |
| 1.2897 | B.62 | C.15 |
| 1.2898 | B.63 | C.15 |
| 1.2899 | B.64 | C.15 |
| 1.2900 | B.65 | C.15 |
| 1.2901 | B.66 | C.15 |
| 1.2902 | B.67 | C.15 |
| 1.2903 | B.68 | C.15 |
| 1.2904 | B.69 | C.15 |
| 1.2905 | B.70 | C.15 |
| 1.2906 | B.71 | C.15 |
| 1.2907 | B.72 | C.15 |
| 1.2908 | B.73 | C.15 |
| 1.2909 | B.74 | C.15 |
| 1.2910 | B.75 | C.15 |
| 1.2911 | B.76 | C.15 |
| 1.2912 | B.77 | C.15 |
| 1.2913 | B.78 | C.15 |
| 1.2914 | B.79 | C.15 |
| 1.2915 | B.80 | C.15 |
| 1.2916 | B.81 | C.15 |
| 1.2917 | B.82 | C.15 |
| 1.2918 | B.83 | C.15 |
| 1.2919 | B.84 | C.15 |
| 1.2920 | B.85 | C.15 |
| 1.2921 | B.86 | C.15 |
| 1.2922 | B.87 | C.15 |
| 1.2923 | B.88 | C.15 |
| 1.2924 | B.89 | C.15 |
| 1.2925 | B.90 | C.15 |
| 1.2926 | B.91 | C.15 |
| 1.2927 | B.92 | C.15 |
| 1.2928 | B.93 | C.15 |
| 1.2929 | B.94 | C.15 |
| 1.2930 | B.95 | C.15 |
| 1.2931 | B.96 | C.15 |
| 1.2932 | B.97 | C.15 |
| 1.2933 | B.98 | C.15 |
| 1.2934 | B.99 | C.15 |
| 1.2935 | B.100 | C.15 |
| 1.2936 | B.101 | C.15 |
| 1.2937 | B.102 | C.15 |
| 1.2938 | B.103 | C.15 |
| 1.2939 | B.104 | C.15 |
| 1.2940 | B.105 | C.15 |
| 1.2941 | B.106 | C.15 |
| 1.2942 | B.107 | C.15 |
| 1.2943 | B.108 | C.15 |
| 1.2944 | B.109 | C.15 |
| 1.2945 | B.110 | C.15 |
| 1.2946 | B.111 | C.15 |
| 1.2947 | B.112 | C.15 |
| 1.2948 | B.113 | C.15 |
| 1.2949 | B.114 | C.15 |
| 1.2950 | B.115 | C.15 |
| 1.2951 | B.116 | C.15 |
| 1.2952 | B.117 | C.15 |
| 1.2953 | B.118 | C.15 |
| 1.2954 | B.119 | C.15 |
| 1.2955 | B.120 | C.15 |
| 1.2956 | B.121 | C.15 |
| 1.2957 | B.122 | C.15 |
| 1.2958 | B.123 | C.15 |
| 1.2959 | B.124 | C.15 |
| 1.2960 | B.125 | C.15 |
| 1.2961 | B.126 | C.15 |
| 1.2962 | B.127 | C.15 |
| 1.2963 | B.128 | C.15 |
| 1.2964 | B.129 | C.15 |
| 1.2965 | B.130 | C.15 |
| 1.2966 | B.131 | C.15 |
| 1.2967 | B.132 | C.15 |
| 1.2968 | B.133 | C.15 |
| 1.2969 | B.134 | C.15 |
| 1.2970 | B.135 | C.15 |
| 1.2971 | B.136 | C.15 |
| 1.2972 | B.137 | C.15 |
| 1.2973 | B.138 | C.15 |
| 1.2974 | B.139 | C.15 |
| 1.2975 | B.140 | C.15 |
| 1.2976 | B.141 | C.15 |
| 1.2977 | B.142 | C.15 |
| 1.2978 | B.143 | C.15 |
| 1.2979 | B.144 | C.15 |
| 1.2980 | B.145 | C.15 |
| 1.2981 | B.146 | C.15 |
| 1.2982 | B.147 | C.15 |
| 1.2983 | B.148 | C.15 |
| 1.2984 | B.149 | C.15 |
| 1.2985 | B.150 | C.15 |
| 1.2986 | B.151 | C.15 |
| 1.2987 | B.152 | C.15 |
| 1.2988 | B.153 | C.15 |
| 1.2989 | B.154 | C.15 |
| 1.2990 | B.155 | C.15 |
| 1.2991 | B.156 | C.15 |
| 1.2992 | B.157 | C.15 |
| 1.2993 | B.158 | C.15 |
| 1.2994 | B.159 | C.15 |
| 1.2995 | B.160 | C.15 |
| 1.2996 | B.161 | C.15 |
| 1.2997 | B.162 | C.15 |
| 1.2998 | B.163 | C.15 |
| 1.2999 | B.164 | C.15 |
| 1.3000 | B.165 | C.15 |
| 1.3001 | B.166 | C.15 |
| 1.3002 | B.167 | C.15 |
| 1.3003 | B.168 | C.15 |
| 1.3004 | B.169 | C.15 |
| 1.3005 | B.170 | C.15 |
| 1.3006 | B.171 | C.15 |
| 1.3007 | B.172 | C.15 |
| 1.3008 | B.173 | C.15 |
| 1.3009 | B.174 | C.15 |
| 1.3010 | B.175 | C.15 |
| 1.3011 | B.176 | C.15 |
| 1.3012 | B.177 | C.15 |
| 1.3013 | B.178 | C.15 |
| 1.3014 | B.179 | C.15 |
| 1.3015 | B.180 | C.15 |
| 1.3016 | B.181 | C.15 |
| 1.3017 | B.182 | C.15 |
| 1.3018 | B.183 | C.15 |
| 1.3019 | B.184 | C.15 |
| 1.3020 | B.185 | C.15 |
| 1.3021 | B.186 | C.15 |
| 1.3022 | B.187 | C.15 |
| 1.3023 | B.188 | C.15 |
| 1.3024 | B.189 | C.15 |
| 1.3025 | B.1 | C.16 |
| 1.3026 | B.2 | C.16 |
| 1.3027 | B.3 | C.16 |
| 1.3028 | B.4 | C.16 |
| 1.3029 | B.5 | C.16 |
| 1.3030 | B.6 | C.16 |
| 1.3031 | B.7 | C.16 |
| 1.3032 | B.8 | C.16 |
| 1.3033 | B.9 | C.16 |
| 1.3034 | B.10 | C.16 |
| 1.3035 | B.11 | C.16 |
| 1.3036 | B.12 | C.16 |
| 1.3037 | B.13 | C.16 |
| 1.3038 | B.14 | C.16 |
| 1.3039 | B.15 | C.16 |
| 1.3040 | B.16 | C.16 |
| 1.3041 | B.17 | C.16 |
| 1.3042 | B.18 | C.16 |
| 1.3043 | B.19 | C.16 |
| 1.3044 | B.20 | C.16 |
| 1.3045 | B.21 | C.16 |
| 1.3046 | B.22 | C.16 |
| 1.3047 | B.23 | C.16 |
| 1.3048 | B.24 | C.16 |
| 1.3049 | B.25 | C.16 |
| 1.3050 | B.26 | C.16 |
| 1.3051 | B.27 | C.16 |
| 1.3052 | B.28 | C.16 |
| 1.3053 | B.29 | C.16 |
| 1.3054 | B.30 | C.16 |
| 1.3055 | B.31 | C.16 |
| 1.3056 | B.32 | C.16 |
| 1.3057 | B.33 | C.16 |
| 1.3058 | B.34 | C.16 |
| 1.3059 | B.35 | C.16 |
| 1.3060 | B.36 | C.16 |
| 1.3061 | B.37 | C.16 |
| 1.3062 | B.38 | C.16 |
| 1.3063 | B.39 | C.16 |
| 1.3064 | B.40 | C.16 |
| 1.3065 | B.41 | C.16 |
| 1.3066 | B.42 | C.16 |
| 1.3067 | B.43 | C.16 |
| 1.3068 | B.44 | C.16 |
| 1.3069 | B.45 | C.16 |
| 1.3070 | B.46 | C.16 |
| 1.3071 | B.47 | C.16 |
| 1.3072 | B.48 | C.16 |
| 1.3073 | B.49 | C.16 |
| 1.3074 | B.50 | C.16 |
| 1.3075 | B.51 | C.16 |
| 1.3076 | B.52 | C.16 |
| 1.3077 | B.53 | C.16 |
| 1.3078 | B.54 | C.16 |
| 1.3079 | B.55 | C.16 |
| 1.3080 | B.56 | C.16 |
| 1.3081 | B.57 | C.16 |
| 1.3082 | B.58. | C.16 |
| 1.3083 | B.59 | C.16 |
| 1.3084 | B.60 | C.16 |
| 1.3085 | B.61 | C.16 |
| 1.3086 | B.62 | C.16 |
| 1.3087 | B.63 | C.16 |
| 1.3088 | B.64 | C.16 |
| 1.3089 | B.65 | C.16 |
| 1.3090 | B.66 | C.16 |
| 1.3091 | B.67 | C.16 |
| 1.3092 | B.68 | C.16 |
| 1.3093 | B.69 | C.16 |
| 1.3094 | B.70 | C.16 |
| 1.3095 | B.71 | C.16 |
| 1.3096 | B.72 | C.16 |
| 1.3097 | B.73 | C.16 |
| 1.3098 | B.74 | C.16 |
| 1.3099 | B.75 | C.16 |
| 1.3100 | B.76 | C.16 |
| 1.3101 | B.77 | C.16 |
| 1.3102 | B.78 | C.16 |
| 1.3103 | B.79 | C.16 |
| 1.3104 | B.80 | C.16 |
| 1.3105 | B.81 | C.16 |
| 1.3106 | B.82 | C.16 |
| 1.3107 | B.83 | C.16 |
| 1.3108 | B.84 | C.16 |
| 1.3109 | B.85 | C.16 |
| 1.3110 | B.86 | C.16 |
| 1.3111 | B.87 | C.16 |
| 1.3112 | B.88 | C.16 |
| 1.3113 | B.89 | C.16 |
| 1.3114 | B.90 | C.16 |
| 1.3115 | B.91 | C.16 |
| 1.3116 | B.92 | C.16 |
| 1.3117 | B.93 | C.16 |
| 1.3118 | B.94 | C.16 |
| 1.3119 | B.95 | C.16 |
| 1.3120 | B.96 | C.16 |
| 1.3121 | B.97 | C.16 |
| 1.3122 | B.98 | C.16 |
| 1.3123 | B.99 | C.16 |
| 1.3124 | B.100 | C.16 |
| 1.3125 | B.101 | C.16 |
| 1.3126 | B.102 | C.16 |
| 1.3127 | B.103 | C.16 |
| 1.3128 | B.104 | C.16 |
| 1.3129 | B.105 | C.16 |
| 1.3130 | B.106 | C.16 |
| 1.3131 | B.107 | C.16 |
| 1.3132 | B.108 | C.16 |
| 1.3133 | B.109 | C.16 |
| 1.3134 | B.110 | C.16 |
| 1.3135 | B.111 | C.16 |
| 1.3136 | B.112 | C.16 |
| 1.3137 | B.113 | C.16 |
| 1.3138 | B.114 | C.16 |
| 1.3139 | B.115 | C.16 |
| 1.3140 | B.116 | C.16 |
| 1.3141 | B.117 | C.16 |
| 1.3142 | B.118 | C.16 |
| 1.3143 | B.119 | C.16 |
| 1.3144 | B.120 | C.16 |
| 1.3145 | B.121 | C.16 |
| 1.3146 | B.122 | C.16 |
| 1.3147 | B.123 | C.16 |
| 1.3148 | B.124 | C.16 |
| 1.3149 | B.125 | C.16 |
| 1.3150 | B.126 | C.16 |
| 1.3151 | B.127 | C.16 |
| 1.3152 | B.128 | C.16 |
| 1.3153 | B.129 | C.16 |
| 1.3154 | B.130 | C.16 |
| 1.3155 | B.131 | C.16 |
| 1.3156 | B.132 | C.16 |
| 1.3157 | B.133 | C.16 |
| 1.3158 | B.134 | C.16 |
| 1.3159 | B.135 | C.16 |
| 1.3160 | B.136 | C.16 |
| 1.3161 | B.137 | C.16 |
| 1.3162 | B.138 | C.16 |
| 1.3163 | B.139 | C.16 |
| 1.3164 | B.140 | C.16 |
| 1.3165 | B.141 | C.16 |
| 1.3166 | B.142 | C.16 |
| 1.3167 | B.143 | C.16 |
| 1.3168 | B.144 | C.16 |
| 1.3169 | B.145 | C.16 |
| 1.3170 | B.146 | C.16 |
| 1.3171 | B.147 | C.16 |
| 1.3172 | B.148 | C.16 |
| 1.3173 | B.149 | C.16 |
| 1.3174 | B.150 | C.16 |
| 1.3175 | B.151 | C.16 |
| 1.3176 | B.152 | C.16 |
| 1.3177 | B.153 | C.16 |
| 1.3178 | B.154 | C.16 |
| 1.3179 | B.155 | C.16 |
| 1.3180 | B.156 | C.16 |
| 1.3181 | B.157 | C.16 |
| 1.3182 | B.158 | C.16 |
| 1.3183 | B.159 | C.16 |
| 1.3184 | B.160 | C.16 |
| 1.3185 | B.161 | C.16 |
| 1.3186 | B.162 | C.16 |
| 1.3187 | B.163 | C.16 |
| 1.3188 | B.164 | C.16 |
| 1.3189 | B.165 | C.16 |
| 1.3190 | B.166 | C.16 |
| 1.3191 | B.167 | C.16 |
| 1.3192 | B.168 | C.16 |
| 1.3193 | B.169 | C.16 |
| 1.3194 | B.170 | C.16 |
| 1.3195 | B.171 | C.16 |
| 1.3196 | B.172 | C.16 |
| 1.3197 | B.173 | C.16 |
| 1.3198 | B.174 | C.16 |
| 1.3199 | B.175 | C.16 |
| 1.3200 | B.176 | C.16 |
| 1.3201 | B.177 | C.16 |
| 1.3202 | B.178 | C.16 |
| 1.3203 | B.179 | C.16 |
| 1.3204 | B.180 | C.16 |
| 1.3205 | B.181 | C.16 |
| 1.3206 | B.182 | C.16 |
| 1.3207 | B.183 | C.16 |
| 1.3208 | B.184 | C.16 |
| 1.3209 | B.185 | C.16 |
| 1.3210 | B.186 | C.16 |
| 1.3211 | B.187 | C.16 |
| 1.3212 | B.188 | C.16 |
| 1.3213 | B.189 | C.16 |
| 1.3214 | B.1 | C.17 |
| 1.3215 | B.2 | C.17 |
| 1.3216 | B.3 | C.17 |
| 1.3217 | B.4 | C.17 |
| 1.3218 | B.5 | C.17 |
| 1.3219 | B.6 | C.17 |
| 1.3220 | B.7 | C.17 |
| 1.3221 | B.8 | C.17 |
| 1.3222 | B.9 | C.17 |
| 1.3223 | B.10 | C.17 |
| 1.3224 | B.11 | C.17 |
| 1.3225 | B.12 | C.17 |
| 1.3226 | B.13 | C.17 |
| 1.3227 | B.14 | C.17 |
| 1.3228 | B.15 | C.17 |
| 1.3229 | B.16 | C.17 |
| 1.3230 | B.17 | C.17 |
| 1.3231 | B.18 | C.17 |
| 1.3232 | B.19 | C.17 |
| 1.3233 | B.20 | C.17 |
| 1.3234 | B.21 | C.17 |
| 1.3235 | B.22 | C.17 |
| 1.3236 | B.23 | C.17 |
| 1.3237 | B.24 | C.17 |
| 1.3238 | B.25 | C.17 |
| 1.3239 | B.26 | C.17 |
| 1.3240 | B.27 | C.17 |
| 1.3241 | B.28 | C.17 |
| 1.3242 | B.29 | C.17 |
| 1.3243 | B.30 | C.17 |
| 1.3244 | B.31 | C.17 |
| 1.3245 | B.32 | C.17 |
| 1.3246 | B.33 | C.17 |
| 1.3247 | B.34 | C.17 |
| 1.3248 | B.35 | C.17 |
| 1.3249 | B.36 | C.17 |
| 1.3250 | B.37 | C.17 |
| 1.3251 | B.38 | C.17 |
| 1.3252 | B.39 | C.17 |
| 1.3253 | B.40 | C.17 |
| 1.3254 | B.41 | C.17 |
| 1.3255 | B.42 | C.17 |
| 1.3256 | B.43 | C.17 |
| 1.3257 | B.44 | C.17 |
| 1.3258 | B.45 | C.17 |
| 1.3259 | B.46 | C.17 |
| 1.3260 | B.47 | C.17 |
| 1.3261 | B.48 | C.17 |
| 1.3262 | B.49 | C.17 |
| 1.3263 | B.50 | C.17 |
| 1.3264 | B.51 | C.17 |
| 1.3265 | B.52 | C.17 |
| 1.3266 | B.53 | C.17 |
| 1.3267 | B.54 | C.17 |
| 1.3268 | B.55 | C.17 |
| 1.3269 | B.56 | C.17 |
| 1.3270 | B.57 | C.17 |
| 1.3271 | B.58. | C.17 |
| 1.3272 | B.59 | C.17 |
| 1.3273 | B.60 | C.17 |
| 1.3274 | B.61 | C.17 |
| 1.3275 | B.62 | C.17 |
| 1.3276 | B.63 | C.17 |
| 1.3277 | B.64 | C.17 |
| 1.3278 | B.65 | C.17 |
| 1.3279 | B.66 | C.17 |
| 1.3280 | B.67 | C.17 |
| 1.3281 | B.68 | C.17 |
| 1.3282 | B.69 | C.17 |
| 1.3283 | B.70 | C.17 |
| 1.3284 | B.71 | C.17 |
| 1.3285 | B.72 | C.17 |
| 1.3286 | B.73 | C.17 |
| 1.3287 | B.74 | C.17 |
| 1.3288 | B.75 | C.17 |
| 1.3289 | B.76 | C.17 |
| 1.3290 | B.77 | C.17 |
| 1.3291 | B.78 | C.17 |
| 1.3292 | B.79 | C.17 |
| 1.3293 | B.80 | C.17 |
| 1.3294 | B.81 | C.17 |
| 1.3295 | B.82 | C.17 |
| 1.3296 | B.83 | C.17 |
| 1.3297 | B.84 | C.17 |
| 1.3298 | B.85 | C.17 |
| 1.3299 | B.86 | C.17 |
| 1.3300 | B.87 | C.17 |
| 1.3301 | B.88 | C.17 |
| 1.3302 | B.89 | C.17 |
| 1.3303 | B.90 | C.17 |
| 1.3304 | B.91 | C.17 |
| 1.3305 | B.92 | C.17 |
| 1.3306 | B.93 | C.17 |
| 1.3307 | B.94 | C.17 |
| 1.3308 | B.95 | C.17 |
| 1.3309 | B.96 | C.17 |
| 1.3310 | B.97 | C.17 |
| 1.3311 | B.98 | C.17 |
| 1.3312 | B.99 | C.17 |
| 1.3313 | B.100 | C.17 |
| 1.3314 | B.101 | C.17 |
| 1.3315 | B.102 | C.17 |
| 1.3316 | B.103 | C.17 |
| 1.3317 | B.104 | C.17 |
| 1.3318 | B.105 | C.17 |
| 1.3319 | B.106 | C.17 |
| 1.3320 | B.107 | C.17 |
| 1.3321 | B.108 | C.17 |
| 1.3322 | B.109 | C.17 |
| 1.3323 | B.110 | C.17 |
| 1.3324 | B.111 | C.17 |
| 1.3325 | B.112 | C.17 |
| 1.3326 | B.113 | C.17 |
| 1.3327 | B.114 | C.17 |
| 1.3328 | B.115 | C.17 |
| 1.3329 | B.116 | C.17 |
| 1.3330 | B.117 | C.17 |
| 1.3331 | B.118 | C.17 |
| 1.3332 | B.119 | C.17 |
| 1.3333 | B.120 | C.17 |
| 1.3334 | B.121 | C.17 |
| 1.3335 | B.122 | C.17 |
| 1.3336 | B.123 | C.17 |
| 1.3337 | B.124 | C.17 |
| 1.3338 | B.125 | C.17 |
| 1.3339 | B.126 | C.17 |
| 1.3340 | B.127 | C.17 |
| 1.3341 | B.128 | C.17 |
| 1.3342 | B.129 | C.17 |
| 1.3343 | B.130 | C.17 |
| 1.3344 | B.131 | C.17 |
| 1.3345 | B.132 | C.17 |
| 1.3346 | B.133 | C.17 |
| 1.3347 | B.134 | C.17 |
| 1.3348 | B.135 | C.17 |
| 1.3349 | B.136 | C.17 |
| 1.3350 | B.137 | C.17 |
| 1.3351 | B.138 | C.17 |
| 1.3352 | B.139 | C.17 |
| 1.3353 | B.140 | C.17 |
| 1.3354 | B.141 | C.17 |
| 1.3355 | B.142 | C.17 |
| 1.3356 | B.143 | C.17 |
| 1.3357 | B.144 | C.17 |
| 1.3358 | B.145 | C.17 |
| 1.3359 | B.146 | C.17 |
| 1.3360 | B.147 | C.17 |
| 1.3361 | B.148 | C.17 |
| 1.3362 | B.149 | C.17 |
| 1.3363 | B.150 | C.17 |
| 1.3364 | B.151 | C.17 |
| 1.3365 | B.152 | C.17 |
| 1.3366 | B.153 | C.17 |
| 1.3367 | B.154 | C.17 |
| 1.3368 | B.155 | C.17 |
| 1.3369 | B.156 | C.17 |
| 1.3370 | B.157 | C.17 |
| 1.3371 | B.158 | C.17 |
| 1.3372 | B.159 | C.17 |
| 1.3373 | B.160 | C.17 |
| 1.3374 | B.161 | C.17 |
| 1.3375 | B.162 | C.17 |
| 1.3376 | B.163 | C.17 |
| 1.3377 | B.164 | C.17 |
| 1.3378 | B.165 | C.17 |
| 1.3379 | B.166 | C.17 |
| 1.3380 | B.167 | C.17 |
| 1.3381 | B.168 | C.17 |
| 1.3382 | B.169 | C.17 |
| 1.3383 | B.170 | C.17 |
| 1.3384 | B.171 | C.17 |
| 1.3385 | B.172 | C.17 |
| 1.3386 | B.173 | C.17 |
| 1.3387 | B.174 | C.17 |
| 1.3388 | B.175 | C.17 |
| 1.3389 | B.176 | C.17 |
| 1.3390 | B.177 | C.17 |
| 1.3391 | B.178 | C.17 |
| 1.3392 | B.179 | C.17 |
| 1.3393 | B.180 | C.17 |
| 1.3394 | B.181 | C.17 |
| 1.3395 | B.182 | C.17 |
| 1.3396 | B.183 | C.17 |
| 1.3397 | B.184 | C.17 |
| 1.3398 | B.185 | C.17 |
| 1.3399 | B.186 | C.17 |
| 1.3400 | B.187 | C.17 |
| 1.3401 | B.188 | C.17 |
| 1.3402 | B.189 | C.17 |
| 1.3403 | — | C.1 |
| 1.3404 | — | C.2 |
| 1.3405 | — | C.3 |
| 1.3406 | — | C.4 |
| 1.3407 | — | C.5 |
| 1.3408 | — | C.6 |
| 1.3409 | — | C.7 |
| 1.3410 | — | C.8 |
| 1.3411 | — | C.9 |
| 1.3412 | — | C.10 |
| 1.3413 | — | C.11 |
| 1.3414 | — | C.12 |
| 1.3415 | — | C.13 |
| 1.3416 | — | C.14 |
| 1.3417 | — | C.15 |
| 1.3418 | — | C.16 |
| 1.3419 | — | C.17 |

[0494] The specific number for each single composition is deductible as follows: Composition 1.777 for example comprises the phenylpyridine of formula (I.a.200), cloransulam-methyl (B.21) and cyprosulfamide (C.4) (see table 1, entry 1.777; as well as table B, entry B.21 and table C, entry C.4).

[0495] Composition 2.777 for example comprises the phenylpyridine of formula (I.a.207) (see the definition for compositions 2.1 to 2.3419 below), cloransulam-methyl (B.21) and cyprosulfamide (C.4) (see table 1, entry 1.777; as well as table B, entry B.21 and table C, entry C.4).

[0496] Composition 7.777 for example comprises saflufenacil (B.92) (see the definition for compositions 7.1 to 7.3383 below), and the compound (I.a.200), cloransulam-methyl (B.21) and cyprosulfamide (C.4) (see table 1, entry 1.777; as well as table B, entry B.21 and table C, entry C.4).

[0497] Also especially preferred are compositions 2.1. to 2.3419 which differ from the corresponding compositions 1.1 to 1.3419 only in that they comprise as the active compound A (I.a.207).

[0498] Also especially preferred are compositions 3.1. to 3.3419 which differ from the corresponding compositions 1.1 to 1.3419 only in that they comprise as the active compound A (I.a.214).

[0499] Also especially preferred are compositions 4.1. to 4.3419 which differ from the corresponding compositions 1.1 to 1.3419 only in that they comprise as the active compound A (I.a.228).

[0500] Also especially preferred are compositions 5.1. to 5.3419 which differ from the corresponding compositions 1.1 to 1.3419 only in that they comprise as the active compound A (I.a.234).

[0501] Also especially preferred are compositions 6.1. to 6.3419 which differ from the corresponding compositions 1.1 to 1.3419 only in that they additionally comprise B.88 as further herbicide B.

[0502] Also especially preferred are compositions 7.1. to 7.3419 which differ from the corresponding compositions 1.1 to 1.3419 only in that they additionally comprise B.92 as further herbicide B.

[0503] Also especially preferred are compositions 8.1. to 8.3419 which differ from the corresponding compositions 1.1 to 1.3419 only in that they additionally comprise B.95 as further herbicide B.

[0504] Also especially preferred are compositions 9.1. to 9.3419 which differ from the corresponding compositions 1.1 to 1.3419 only in that they additionally comprise B.116 as further herbicide B.

[0505] Also especially preferred are compositions 10.1. to 10.3419 which differ from the corresponding compositions 1.1 to 1.3419 only in that they additionally comprise B.125 as further herbicide B.

[0506] Also especially preferred are compositions 11.1. to 11.3419 which differ from the corresponding compositions 1.1 to 1.3419 only in that they additionally comprise B.151 as further herbicide B.

[0507] Also especially preferred are compositions 12.1. to 12.3419 which differ from the corresponding compositions 1.1 to 1.3419 only in that they additionally comprise B.88 and B.116 as further herbicides B.

[0508] Also especially preferred are compositions 13.1. to 13.3419 which differ from the corresponding compositions 1.1 to 1.3419 only in that they additionally comprise B.92 and B.116 as further herbicides B.

[0509] Also especially preferred are compositions 14.1. to 14.3419 which differ from the corresponding compositions 1.1 to 1.3419 only in that they additionally comprise B.95 and B.116 as further herbicides B.

[0510] Also especially preferred are compositions 15.1. to 15.3419 which differ from the corresponding compositions 1.1 to 1.3419 only in that they additionally comprise B.116 and B.125 as further herbicides B.

[0511] Also especially preferred are compositions 16.1. to 16.3419 which differ from the corresponding compositions 1.1 to 1.3419 only in that they additionally comprise B.116 and B.151 as further herbicides B.

[0512] Also especially preferred are compositions 17.1. to 17.3419 which differ from the corresponding compositions 1.1 to 1.3419 only in that they additionally comprise B.88, B.92 and B.116 as further herbicides B.

[0513] Also especially preferred are compositions 18.1. to 18.3419 which differ from the corresponding compositions 1.1 to 1.3419 only in that they additionally comprise B.95, B.92 and B.116 as further herbicides B.

[0514] Also especially preferred are compositions 19.1. to 19.3419 which differ from the corresponding compositions 1.1 to 1.3419 only in that they additionally comprise B.92, B.116 and B.125 as further herbicides B.

[0515] Also especially preferred are compositions 20.1. to 20.3419 which differ from the corresponding compositions 1.1 to 1.3419 only in that they additionally comprise B.92, B.116 and B.151 as further herbicides B.

[0516] It is generally preferred to use the compounds of the invention in combination with herbicides that are selective for the crop being treated and which complement the spectrum of weeds controlled by these compounds at the application rate employed. It is further generally preferred to apply the compounds of the invention and other complementary herbicides at the same time, either as a combination formulation or as a tank mix.

[0517] It is recognized that the polynucleotide molecules and polypeptides of the invention encompass polypeptides comprising an amino acid sequence that is sufficiently identical to the amino acid sequences set forth in SEQ ID Nos: 1, 2, 3, 4, 5, 6, 7, 8, 9, 10, 11, 12, 13, 14, 15, 16, 17, 18, 19, 20, 21, 22, 23, 24, 25, 26, 27, 28, 29, 30, 31, 32, 33, 34, 35, 36, 37, 38, 39, 40, 41, 42, 43, 44, 45, 46, 47, 48, 49, 50, 51, 52, 53, 54, 55, 56, 57, 58, 59, 60, 61, 62, 63, 64, 65, 66, 67, 68, 69, 70, 71, 72, 73, 74, 75, 76, 77, 78, 79, 80, 81, 82, 83, 84, 85, 86, 87, 88, 89, 90, 91, 92, 93, 94, 95, 96, 97, 98, 99, 100, 101, 102, 103, 104, 105, 106, 107, 108, 109, 110, 111, 112, 113, 114, 115, 116, 117, 265, 266, 267, 268, 269, 270, 271, 272, 273, 274, 275, 276, 277, 278, 279, 280, 281, 282, 283, 284, 285, 286, 287, 288, 289, 290, 291, 292, 293, 294, 295, 296, 297, 298, 299, 300, 301, 302, 303, 304, 305, 306, 307, 308, 309, 310, 311, 312, 313, 314, 315, 316, 317, 318, 319, 320, 321, 322, 323, 324, 325, 326, 327328, 329, 330, 331, 332, 333, 334, 335, 336, 337, 338, 339, 340, 341, 342, 343, 344, 345, 346, 347, 348, 349, 350, 351, 352, 353, 354, 355, 356, 357, 358, 359, 360, 361, 362, 363, 364, 365, 366, 367, 368, 369, 370, 371, 372, 373, 374, 375, 376, 377, 378, 379, 380, 381, 382, 383, 384, 385, 386, 387, 388, 389, 390, 391, 392, 393, 394, 395, 396, 397, 398, 399, 400, 401, 402, 403, 404, 405, 406, 407, 408, 409, 410, 411, 412, 413, 414, 415, 416, 417, 418, 419, 420, 421, 422, 423, 424, 425, 426, 427, 428, 429, 430, 431, 432, 433, 434, 435, 436, 437, 438, 439, 440, 441, 442, 443, 444, 445, 446, 447, 448, 449, 450, 451, 452, 453, 454, 455, 456, 457, 458, 459, 460, 461, 462, 463, 464, 465, 466, 467, 468, 469, 470, 471, 472, 473, 474, 475, 476, 477, 478, 479, 480, 481, 482, 483, 484, 485, 486, 487, 488, 489, 490, 491, 492, 493, 494, 495, 496, 497, 498, 499, 500, 501, 502, 503, 504, 505, 506, 507, 508, 509, 510, 511, 512, 513, 514, 515, 516, 517, 518, 519, 520, 521, 522, 523, 524, 525, 526, 527, 528, 529, 530, 531, 532, 533, 534, 535, 536, 537, 538, 539, 540, 541, 542, 543, 544, 545, 546, 547, 548, 549, 550, 551, 552, 553, 554, 555, 556, 557, 558, 559, 560, 561, 562, 563, 564, or 565. The term “sufficiently identical” is used herein to refer to a first amino acid or nucleotide sequence that contains a sufficient or minimum number of identical or equivalent (e.g., with a similar side chain) amino acid residues or nucleotides to a second amino acid or nucleotide sequence such that the first and second amino acid or nucleotide sequences have a common structural domain and/or common functional activity.

[0518] Generally, “sequence identity” refers to the extent to which two optimally aligned DNA or amino acid sequences are invariant throughout a window of alignment of components, e.g., nucleotides or amino acids. An “identity fraction” for aligned segments of a test sequence and a reference sequence is the number of identical components that are shared by the two aligned sequences divided by the total number of components in reference sequence segment, i.e., the entire reference sequence or a smaller defined part of the reference sequence. “Percent identity” is the identity fraction times 100. Optimal alignment of sequences for aligning a comparison window are well known to those skilled in the art and may be conducted by tools such as the local homology algorithm of Smith and Waterman, the homology alignment algorithm of Needleman and Wunsch, the search for similarity method of Pearson and Lipman, and preferably by computerized implementations of these algorithms such as GAP, BESTFIT, FASTA, and TFASTA available as part of the GCG. Wisconsin Package. (Accelrys Inc. Burlington, Mass.)

[0519] Polynucleotides and Oligonucleotides

[0520] By an “isolated polynucleotide”, including DNA, RNA, or a combination of these, single or double stranded, in the sense or antisense orientation or a combination of both, dsRNA or otherwise, we mean a polynucleotide which is at least partially separated from the polynucleotide sequences with which it is associated or linked in its native state. That means other nucleic acid molecules are present in an amount less than 5% based on weight of the amount of the desired nucleic acid, preferably less than 2% by weight, more preferably less than 1% by weight, most preferably less than 0.5% by weight. Preferably, an “isolated” nucleic acid is free of some of the sequences that naturally flank the nucleic acid (i.e., sequences located at the 5′ and 3′ ends of the nucleic acid) in the genomic DNA of the organism from which the nucleic acid is derived. For example, in various embodiments, the isolated herbicide resistance and/or tolerance related protein encoding nucleic acid molecule can contain less than about 5 kb, 4 kb, 3 kb, 2 kb, 1 kb, 0.5 kb or 0.1 kb of nucleotide sequences which naturally flank the nucleic acid molecule in genomic DNA of the cell from which the nucleic acid is derived. Moreover, an “isolated” nucleic acid molecule, such as a cDNA molecule, can be free from some of the other cellular material with which it is naturally associated, or culture medium when produced by recombinant techniques, or chemical precursors or other chemicals when chemically synthesized. Preferably, the isolated polynucleotide is at least 60% free, preferably at least 75% free, and most preferably at least 90% free from other components with which they are naturally associated. As the skilled addressee would be aware, an isolated polynucleotide can be an exogenous polynucleotide present in, for example, a transgenic organism which does not naturally comprise the polynucleotide. Furthermore, the terms “polynucleotide(s)”, “nucleic acid sequence(s)”, “nucleotide sequence(s)”, “nucleic acid(s)”, “nucleic acid molecule” are used interchangeably herein and refer to nucleotides, either ribonucleotides or deoxyribonucleotides or a combination of both, in a polymeric unbranched form of any length.

[0521] The term “mutated PPO nucleic acid” refers to a PPO nucleic acid having a sequence that is mutated from a wild-type PPO nucleic acid, such as e.g. SEQ ID NO: 118, 119, 120, 121, 122, 123, 124, 125, 126, 127, 128, 624, or 626, or homologues, paralogues and and orthologues thereof; and that confers increased phenylpyridine herbicide tolerance to a plant in which it is expressed. Furthermore, the term “mutated protoporphyrinogen oxidase (mutated PPO)” refers to the replacement of an amino acid of the wild-type primary sequences SEQ ID NO: 1, 2, 3, 4, 5, 6, 7, 8, 9, 10, 11, 12, 13, 14, 15, 16, 17, 18, 19, 20, 21, 22, 23, 24, 25, 26, 27, 28, 29, 30, 31, 32, 33, 34, 35, 36, 37, 38, 39, 40, 41, 42, 43, 44, 45, 46, 47, 48, 49, 50, 51, 52, 53, 54, 55, 56, 57, 58, 59, 60, 61, 62, 63, 64, 65, 66, 67, 68, 69, 70, 71, 72, 73, 74, 75, 76, 77, 78, 79, 80, 81, 82, 83, 84, 85, 86, 87, 88, 89, 90, 91, 92, 93, 94, 95, 96, 97, 98, 99, 100, 101, 102, 103, 104, 105, 106, 107, 108, 109, 110, 111, 112, 113, 114, 115, 116, 117, 577, 579, 581, 583, 585, 587, 589, 591, 593, 595, 597, 599, 601, 603, 605, 607, 609, 611, 613, 615, 617, 619, 621, 623, 625, or 627, or a variant, a derivative, a homologue, an orthologue, or paralogue thereof, with another amino acid. The expression “mutated amino acid” will be used below to designate the amino acid which is replaced by another amino acid, thereby designating the site of the mutation in the primary sequence of the protein.

[0522] In a preferred embodiment, the PPO nucleotide sequence encoding a mutated PPO comprises the sequence of SEQ ID NO: 118, 119, 120, 121, 122, 123, 124, 125, 126, 127, 128, 624, or 626, or a variant or derivative thereof.

[0523] Furthermore, it will be understood by the person skilled in the art that the PPO nucleotide sequences encompasse homologues, paralogues and and orthologues of SEQ ID NO: 118, 119, 120, 121, 122, 123, 124, 125, 126, 127, 128, 624, or 626, as defined hereinafter.

[0524] The term “variant” with respect to a sequence (e.g., a polypeptide or nucleic acid sequence such as—for example—a transcription regulating nucleotide sequence of the invention) is intended to mean substantially similar sequences. For nucleotide sequences comprising an open reading frame, variants include those sequences that, because of the degeneracy of the genetic code, encode the identical amino acid sequence of the native protein. Naturally occurring allelic variants such as these can be identified with the use of well-known molecular biology techniques, as, for example, with polymerase chain reaction (PCR) and hybridization techniques. Variant nucleotide sequences also include synthetically derived nucleotide sequences, such as those generated, for example, by using site-directed mutagenesis and for open reading frames, encode the native protein, as well as those that encode a polypeptide having amino acid substitutions relative to the native protein, e.g. the mutated PPO according to the present invention as disclosed herein.

[0525] Generally, nucleotide sequence variants of the invention will have at least 30, 40, 50, 60, to 70%, e.g., preferably 71%, 72%, 73%, 74%, 75%, 76%, 77%, 78%, to 79%, generally at least 80%, e.g., 81%-84%, at least 85%, e.g., 86%, 87%, 88%, 89%, 90%, 91%, 92%, 93%, 94%, 95%, 96%, 97%, to 98% and 99% nucleotide “sequence identity” to the nucleotide sequence encoding a polypeptide of SEQ ID NO: 1, 2, 3, 4, 5, 6, 7, 8, 9, 10, 11, 12, 13, 14, 15, 16, 17, 18, 19, 20, 21, 22, 23, 24, 25, 26, 27, 28, 29, 30, 31, 32, 33, 34, 35, 36, 37, 38, 39, 40, 41, 42, 43, 44, 45, 46, 47, 48, 49, 50, 51, 52, 53, 54, 55, 56, 57, 58, 59, 60, 61, 62, 63, 64, 65, 66, 67, 68, 69, 70, 71, 72, 73, 74, 75, 76, 77, 78, 79, 80, 81, 82, 83, 84, 85, 86, 87, 88, 89, 90, 91, 92, 93, 94, 95, 96, 97, 98, 99, 100, 101, 102, 103, 104, 105, 106, 107, 108, 109, 110, 111, 112, 113, 114, 115, 116, 117, 577, 579, 581, 583, 585, 587, 589, 591, 593, 595, 597, 599, 601, 603, 605, 607, 609, 611, 613, 615, 617, 619, 621, 623, 625, 627, 265, 266, 267, 268, 269, 270, 271, 272, 273, 274, 275, 276, 277, 278, 279, 280, 281, 282, 283, 284, 285, 286, 287, 288, 289, 290, 291, 292, 293, 294, 295, 296, 297, 298, 299, 300, 301, 302, 303, 304, 305, 306, 307, 308, 309, 310, 311, 312, 313, 314, 315, 316, 317, 318, 319, 320, 321, 322, 323, 324, 325, 326, 327328, 329, 330, 331, 332, 333, 334, 335, 336, 337, 338, 339, 340, 341, 342, 343, 344, 345, 346, 347, 348, 349, 350, 351, 352, 353, 354, 355, 356, 357, 358, 359, 360, 361, 362, 363, 364, 365, 366, 367, 368, 369, 370, 371, 372, 373, 374, 375, 376, 377, 378, 379, 380, 381, 382, 383, 384, 385, 386, 387, 388, 389, 390, 391, 392, 393, 394, 395, 396, 397, 398, 399, 400, 401, 402, 403, 404, 405, 406, 407, 408, 409, 410, 411, 412, 413, 414, 415, 416, 417, 418, 419, 420, 421, 422, 423, 424, 425, 426, 427, 428, 429, 430, 431, 432, 433, 434, 435, 436, 437, 438, 439, 440, 441, 442, 443, 444, 445, 446, 447, 448, 449, 450, 451, 452, 453, 454, 455, 456, 457, 458, 459, 460, 461, 462, 463, 464, 465, 466, 467, 468, 469, 470, 471, 472, 473, 474, 475, 476, 477, 478, 479, 480, 481, 482, 483, 484, 485, 486, 487, 488, 489, 490, 491, 492, 493, 494, 495, 496, 497, 498, 499, 500, 501, 502, 503, 504, 505, 506, 507, 508, 509, 510, 511, 512, 513, 514, 515, 516, 517, 518, 519, 520, 521, 522, 523, 524, 525, 526, 527, 528, 529, 530, 531, 532, 533, 534, 535, 536, 537, 538, 539, 540, 541, 542, 543, 544, 545, 546, 547, 548, 549, 550, 551, 552, 553, 554, 555, 556, 557, 558, 559, 560, 561, 562, 563, 564, or 565.

[0526] The % identity of a polynucleotide is determined by GAP (Needleman and Wunsch, 1970) analysis (GCG program) with a gap creation penalty=5, and a gap extension penalty=0.3. Unless stated otherwise, the query sequence is at least 45 nucleotides in length, and the GAP analysis aligns the two sequences over a region of at least 45 nucleotides. Preferably, the query sequence is at least 150 nucleotides in length, and the GAP analysis aligns the two sequences over a region of at least 150 nucleotides. More preferably, the query sequence is at least 300 nucleotides in length and the GAP analysis aligns the two sequences over a region of at least 300 nucleotides. Even more preferably, the GAP analysis aligns the two sequences over their entire length.

[0527] Polypeptides

[0528] By “substantially purified polypeptide” or “purified” a polypeptide is meant that has been separated from one or more lipids, nucleic acids, other polypeptides, or other contaminating molecules with which it is associated in its native state. It is preferred that the substantially purified polypeptide is at least 60% free, more preferably at least 75% free, and more preferably at least 90% free from other components with which it is naturally associated. As the skilled addressee will appreciate, the purified polypeptide can be a recombinantly produced polypeptide. The terms “polypeptide” and “protein” are generally used interchangeably and refer to a single polypeptide chain which may or may not be modified by addition of non-amino acid groups. It would be understood that such polypeptide chains may associate with other polypeptides or proteins or other molecules such as co-factors.

[0529] The terms “proteins” and “polypeptides” as used herein also include variants, mutants, modifications, analogous and/or derivatives of the polypeptides of the invention as described herein.

[0530] The % identity of a polypeptide is determined by GAP (Needleman and Wunsch, 1970) analysis (GCG program) with a gap creation penalty=5, and a gap extension penalty=0.3. The query sequence is at least 25 amino acids in length, and the GAP analysis aligns the two sequences over a region of at least 25 amino acids. More preferably, the query sequence is at least 50 amino acids in length, and the GAP analysis aligns the two sequences over a region of at least 50 amino acids. More preferably, the query sequence is at least 100 amino acids in length and the GAP analysis aligns the two sequences over a region of at least 100 amino acids. Even more preferably, the query sequence is at least 250 amino acids in length and the GAP analysis aligns the two sequences over a region of at least 250 amino acids. Even more preferably, the GAP analysis aligns the two sequences over their entire length.

[0531] With regard to a defined polypeptide, it will be appreciated that % identity figures higher than those provided above will encompass preferred embodiments. Thus, where applicable, in light of the minimum % identity figures, it is preferred that the PPO polypeptide of the invention comprises an amino acid sequence which is at least 40%, more preferably at least 45%, more preferably at least 50%, more preferably at least 55%, more preferably at least 60%, more preferably at least 65%, more preferably at least 70%, more preferably at least 75%, more preferably at least 80%, more preferably at least 85%, more preferably at least 90%, more preferably at least 91%, more preferably at least 92%, more preferably at least 93%, more preferably at least 94%, more preferably at least 95%, more preferably at least 96%, more preferably at least 97%, more preferably at least 98%, more preferably at least 99%, more preferably at least 99.1%, more preferably at least 99.2%, more preferably at least 99.3%, more preferably at least 99.4%, more preferably at least 99.5%, more preferably at least 99.6%, more preferably at least 99.7%, more preferably at least 99.8%, and even more preferably at least 99.9% identical to SEQ ID NO: 1, 2, 3, 4, 5, 6, 7, 8, 9, 10, 11, 12, 13, 14, 15, 16, 17, 18, 19, 20, 21, 22, 23, 24, 25, 26, 27, 28, 29, 30, 31, 32, 33, 34, 35, 36, 37, 38, 39, 40, 41, 42, 43, 44, 45, 46, 47, 48, 49, 50, 51, 52, 53, 54, 55, 56, 57, 58, 59, 60, 61, 62, 63, 64, 65, 66, 67, 68, 69, 70, 71, 72, 73, 74, 75, 76, 77, 78, 79, 80, 81, 82, 83, 84, 85, 86, 87, 88, 89, 90, 91, 92, 93, 94, 95, 96, 97, 98, 99, 100, 101, 102, 103, 104, 105, 106, 107, 108, 109, 110, 111, 112, 113, 114, 115, 116, 117, 577, 579, 581, 583, 585, 587, 589, 591, 593, 595, 597, 599, 601, 603, 605, 607, 609, 611, 613, 615, 617, 619, 621, 623, 625, 627, 265, 266, 267, 268, 269, 270, 271, 272, 273, 274, 275, 276, 277, 278, 279, 280, 281, 282, 283, 284, 285, 286, 287, 288, 289, 290, 291, 292, 293, 294, 295, 296, 297, 298, 299, 300, 301, 302, 303, 304, 305, 306, 307, 308, 309, 310, 311, 312, 313, 314, 315, 316, 317, 318, 319, 320, 321, 322, 323, 324, 325, 326, 327328, 329, 330, 331, 332, 333, 334, 335, 336, 337, 338, 339, 340, 341, 342, 343, 344, 345, 346, 347, 348, 349, 350, 351, 352, 353, 354, 355, 356, 357, 358, 359, 360, 361, 362, 363, 364, 365, 366, 367, 368, 369, 370, 371, 372, 373, 374, 375, 376, 377, 378, 379, 380, 381, 382, 383, 384, 385, 386, 387, 388, 389, 390, 391, 392, 393, 394, 395, 396, 397, 398, 399, 400, 401, 402, 403, 404, 405, 406, 407, 408, 409, 410, 411, 412, 413, 414, 415, 416, 417, 418, 419, 420, 421, 422, 423, 424, 425, 426, 427, 428, 429, 430, 431, 432, 433, 434, 435, 436, 437, 438, 439, 440, 441, 442, 443, 444, 445, 446, 447, 448, 449, 450, 451, 452, 453, 454, 455, 456, 457, 458, 459, 460, 461, 462, 463, 464, 465, 466, 467, 468, 469, 470, 471, 472, 473, 474, 475, 476, 477, 478, 479, 480, 481, 482, 483, 484, 485, 486, 487, 488, 489, 490, 491, 492, 493, 494, 495, 496, 497, 498, 499, 500, 501, 502, 503, 504, 505, 506, 507, 508, 509, 510, 511, 512, 513, 514, 515, 516, 517, 518, 519, 520, 521, 522, 523, 524, 525, 526, 527, 528, 529, 530, 531, 532, 533, 534, 535, 536, 537, 538, 539, 540, 541, 542, 543, 544, 545, 546, 547, 548, 549, 550, 551, 552, 553, 554, 555, 556, 557, 558, 559, 560, 561, 562, 563, 564, or 565.

[0532] By “variant” polypeptide is intended a polypeptide derived from the protein of SEQ ID NO: 1, 2, 3, 4, 5, 6, 7, 8, 9, 10, 11, 12, 13, 14, 15, 16, 17, 18, 19, 20, 21, 22, 23, 24, 25, 26, 27, 28, 29, 30, 31, 32, 33, 34, 35, 36, 37, 38, 39, 40, 41, 42, 43, 44, 45, 46, 47, 48, 49, 50, 51, 52, 53, 54, 55, 56, 57, 58, 59, 60, 61, 62, 63, 64, 65, 66, 67, 68, 69, 70, 71, 72, 73, 74, 75, 76, 77, 78, 79, 80, 81, 82, 83, 84, 85, 86, 87, 88, 89, 90, 91, 92, 93, 94, 95, 96, 97, 98, 99, 100, 101, 102, 103, 104, 105, 106, 107, 108, 109, 110, 111, 112, 113, 114, 115, 116, 117, 577, 579, 581, 583, 585, 587, 589, 591, 593, 595, 597, 599, 601, 603, 605, 607, 609, 611, 613, 615, 617, 619, 621, 623, 625, 627, 265, 266, 267, 268, 269, 270, 271, 272, 273, 274, 275, 276, 277, 278, 279, 280, 281, 282, 283, 284, 285, 286, 287, 288, 289, 290, 291, 292, 293, 294, 295, 296, 297, 298, 299, 300, 301, 302, 303, 304, 305, 306, 307, 308, 309, 310, 311, 312, 313, 314, 315, 316, 317, 318, 319, 320, 321, 322, 323, 324, 325, 326, 327328, 329, 330, 331, 332, 333, 334, 335, 336, 337, 338, 339, 340, 341, 342, 343, 344, 345, 346, 347, 348, 349, 350, 351, 352, 353, 354, 355, 356, 357, 358, 359, 360, 361, 362, 363, 364, 365, 366, 367, 368, 369, 370, 371, 372, 373, 374, 375, 376, 377, 378, 379, 380, 381, 382, 383, 384, 385, 386, 387, 388, 389, 390, 391, 392, 393, 394, 395, 396, 397, 398, 399, 400, 401, 402, 403, 404, 405, 406, 407, 408, 409, 410, 411, 412, 413, 414, 415, 416, 417, 418, 419, 420, 421, 422, 423, 424, 425, 426, 427, 428, 429, 430, 431, 432, 433, 434, 435, 436, 437, 438, 439, 440, 441, 442, 443, 444, 445, 446, 447, 448, 449, 450, 451, 452, 453, 454, 455, 456, 457, 458, 459, 460, 461, 462, 463, 464, 465, 466, 467, 468, 469, 470, 471, 472, 473, 474, 475, 476, 477, 478, 479, 480, 481, 482, 483, 484, 485, 486, 487, 488, 489, 490, 491, 492, 493, 494, 495, 496, 497, 498, 499, 500, 501, 502, 503, 504, 505, 506, 507, 508, 509, 510, 511, 512, 513, 514, 515, 516, 517, 518, 519, 520, 521, 522, 523, 524, 525, 526, 527, 528, 529, 530, 531, 532, 533, 534, 535, 536, 537, 538, 539, 540, 541, 542, 543, 544, 545, 546, 547, 548, 549, 550, 551, 552, 553, 554, 555, 556, 557, 558, 559, 560, 561, 562, 563, 564, or 565, by deletion (so-called truncation) or addition of one or more amino acids to the N-terminal and/or C-terminal end of the native protein; deletion or addition of one or more amino acids at one or more sites in the native protein; or substitution of one or more amino acids at one or more sites in the native protein. Such variants may result from, for example, genetic polymorphism or from human manipulation. Methods for such manipulations are generally known in the art.

[0533] “Derivatives” of a protein encompass peptides, oligopeptides, polypeptides, proteins and enzymes having amino acid substitutions, deletions and/or insertions relative to the unmodified protein in question and having similar biological and functional activity as the unmodified protein from which they are derived.

[0534] “Homologues” of a protein encompass peptides, oligopeptides, polypeptides, proteins and enzymes having amino acid substitutions, deletions and/or insertions relative to the unmodified protein in question and having similar biological and functional activity as the unmodified protein from which they are derived.

[0535] A deletion refers to removal of one or more amino acids from a protein.

[0536] An insertion refers to one or more amino acid residues being introduced into a predetermined site in a protein. Insertions may comprise N-terminal and/or C-terminal fusions as well as intra-sequence insertions of single or multiple amino acids. Generally, insertions within the amino acid sequence will be smaller than N- or C-terminal fusions, of the order of about 1 to 10 residues. Examples of N- or C-terminal fusion proteins or peptides include the binding domain or activation domain of a transcriptional activator as used in the yeast two-hybrid system, phage coat proteins, (histidine)-6-tag, glutathione S-transferase-tag, protein A, maltose-binding protein, dihydrofolate reductase, Tag*100 epitope, c-myc epitope, FLAG®-epitope, lacZ, CMP (calmodulin-binding peptide), HA epitope, protein C epitope and VSV epitope.

[0537] A substitution refers to replacement of amino acids of the protein with other amino acids having similar properties (such as similar hydrophobicity, hydrophilicity, antigenicity, propensity to form or break α-helical structures or (3-sheet structures). Amino acid substitutions are typically of single residues, but may be clustered depending upon functional constraints placed upon the polypeptide and may range from 1 to 10 amino acids; insertions will usually be of the order of about 1 to 10 amino acid residues. The amino acid substitutions are preferably conservative amino acid substitutions. Conservative substitution tables are well known in the art (see for example Creighton (1984) Proteins. W.H. Freeman and Company (Eds).

TABLE 1
Examples of conserved amino acid substitutions

| Residue | Conservative Substitutions |
|---|---|
| Ala | Ser |
| Arg | Lys |
| Asn | Gln; His |
| Asp | Glu |
| Gln | Asn |
| Cys | Ser |
| Glu | Asp |
| Gly | Pro |
| His | Asn; Gln |
| Ile | Leu, Val |
| Leu | Ile; Val |
| Lys | Arg; Gln |
| Met | Leu; Ile |
| Phe | Met; Leu; Tyr |
| Ser | Thr; Gly |
| Thr | Ser; Val |
| Trp | Tyr |
| Tyr | Trp; Phe |
| Val | Ile; Leu |

[0538] Amino acid substitutions, deletions and/or insertions may readily be made using peptide synthetic techniques well known in the art, such as solid phase peptide synthesis and the like, or by recombinant DNA manipulation. Methods for the manipulation of DNA sequences to produce substitution, insertion or deletion variants of a protein are well known in the art. For example, techniques for making substitution mutations at predetermined sites in DNA are well known to those skilled in the art and include M13 mutagenesis, T7-Gen in vitro mutagenesis (USB, Cleveland, Ohio), QuickChange Site Directed mutagenesis (Stratagene, San Diego, Calif.), PCR-mediated site-directed mutagenesis or other site-directed mutagenesis protocols.

[0539] “Derivatives” further include peptides, oligopeptides, polypeptides which may, compared to the amino acid sequence of the naturally-occurring form of the protein, such as the protein of interest, comprise substitutions of amino acids with non-naturally occurring amino acid residues, or additions of non-naturally occurring amino acid residues. “Derivatives” of a protein also encompass peptides, oligopeptides, polypeptides which comprise naturally occurring altered (glycosylated, acylated, prenylated, phosphorylated, myristoylated, sulphated etc.) or non-naturally altered amino acid residues compared to the amino acid sequence of a naturally-occurring form of the polypeptide. A derivative may also comprise one or more non-amino acid substituents or additions compared to the amino acid sequence from which it is derived, for example a reporter molecule or other ligand, covalently or non-covalently bound to the amino acid sequence, such as a reporter molecule which is bound to facilitate its detection, and non-naturally occurring amino acid residues relative to the amino acid sequence of a naturally-occurring protein. Furthermore, “derivatives” also include fusions of the naturally-occurring form of the protein with tagging peptides such as FLAG, HIS6 or thioredoxin (for a review of tagging peptides, see Terpe, Appl. Microbiol. Biotechnol. 60, 523-533, 2003).

[0540] “Orthologues” and “paralogues” encompass evolutionary concepts used to describe the ancestral relationships of genes. Paralogues are genes within the same species that have originated through duplication of an ancestral gene; orthologues are genes from different organisms that have originated through speciation, and are also derived from a common ancestral gene.

[0541] It is well-known in the art that paralogues and orthologues may share distinct domains harboring suitable amino acid residues at given sites, such as binding pockets for particular substrates or binding motifs for interaction with other proteins.

[0542] The term “domain” refers to a set of amino acids conserved at specific positions along an alignment of sequences of evolutionarily related proteins. While amino acids at other positions can vary between homologues, amino acids that are highly conserved at specific positions indicate amino acids that are likely essential in the structure, stability or function of a protein. Identified by their high degree of conservation in aligned sequences of a family of protein homologues, they can be used as identifiers to determine if any polypeptide in question belongs to a previously identified polypeptide family.

[0543] The term “motif” or “consensus sequence” refers to a short conserved region in the sequence of evolutionarily related proteins. Motifs are frequently highly conserved parts of domains, but may also include only part of the domain, or be located outside of conserved domain (if all of the amino acids of the motif fall outside of a defined domain). Preferred motifs which are contained in the sequences of the PPO polypeptides according to the present invention are SQ[N/K/H]KRYI, TLGTLFSS, [F/Y]TTF[V/I]GG.

[0544] Specialist databases exist for the identification of domains, for example, SMART (Schultz et al. (1998) Proc. Natl. Acad. Sci. USA 95, 5857-5864; Letunic et al. (2002) Nucleic Acids Res 30, 242-244), InterPro (Mulder et al., (2003) Nucl. Acids. Res. 31, 315-318), Prosite (Bucher and Bairoch (1994), A generalized profile syntax for biomolecular sequences motifs and its function in automatic sequence interpretation. (In) ISMB-94; Proceedings 2nd International Conference on Intelligent Systems for Molecular Biology. Altman R., Brutlag D., Karp P., Lathrop R., Searls D., Eds., pp 53-61, AAAI Press, Menlo Park; Hulo et al., Nucl. Acids. Res. 32:D134-D137, (2004)), or Pfam (Bateman et al., Nucleic Acids Research 30(1): 276-280 (2002)). A set of tools for in silico analysis of protein sequences is available on the ExPASy proteomics server (Swiss Institute of Bioinformatics (Gasteiger et al., ExPASy: the proteomics server for in-depth protein knowledge and analysis, Nucleic Acids Res. 31:3784-3788(2003)). Domains or motifs may also be identified using routine techniques, such as by sequence alignment.

[0545] Methods for the alignment of sequences for comparison are well known in the art, such methods include GAP, BESTFIT, BLAST, FASTA and TFASTA. GAP uses the algorithm of Needleman and Wunsch ((1970) J Mol Biol 48: 443-453) to find the global (i.e. spanning the complete sequences) alignment of two sequences that maximizes the number of matches and minimizes the number of gaps. The BLAST algorithm (Altschul et al. (1990) J Mol Biol 215: 403-10) calculates percent sequence identity and performs a statistical analysis of the similarity between the two sequences. The software for performing BLAST analysis is publicly available through the National Centre for Biotechnology Information (NCBI). Homologues may readily be identified using, for example, the ClustalW multiple sequence alignment algorithm (version 1.83), with the default pairwise alignment parameters, and a scoring method in percentage. Global percentages of similarity and identity may also be determined using one of the methods available in the MatGAT software package (Campanella et al., BMC Bioinformatics. 2003 Jul. 10; 4:29. MatGAT: an application that generates similarity/identity matrices using protein or DNA sequences.). Minor manual editing may be performed to optimise alignment between conserved motifs, as would be apparent to a person skilled in the art. Furthermore, instead of using full-length sequences for the identification of homologues, specific domains may also be used. The sequence identity values may be determined over the entire nucleic acid or amino acid sequence or over selected domains or conserved motif(s), using the programs mentioned above using the default parameters. For local alignments, the Smith-Waterman algorithm is particularly useful (Smith T F, Waterman M S (1981) J. Mol. Biol 147(1); 195-7).

[0546] The inventors of the present invention have found that by substituting one or more of the key amino acid residues, employing e.g. one of the above described methods to mutate the encoding nucleic acids, the phenylpyridine herbicide tolerance or resistance could be remarkably increased as compared to the activity of the wild type PPO enzymes with SEQ ID NO: 1, 2, 3, 4, 5, 6, 7, 8, 9, 10, 11, 12, 13, 14, 15, 16, 17, 18, 19, 20, 21, 22, 23, 24, 25, 26, 27, 28, 29, 30, 31, 32, 33, 34, 35, 36, 37, 38, 39, 40, 41, 42, 43, 44, 45, 46, 47, 48, 49, 50, 51, 52, 53, 54, 55, 56, 57, 58, 59, 60, 61, 62, 63, 64, 65, 66, 67, 68, 69, 70, 71, 72, 73, 74, 75, 76, 77, 78, 79, 80, 81, 82, 83, 84, 85, 86, 87, 88, 89, 90, 91, 92, 93, 94, 95, 96, 97, 98, 99, 100, 101, 102, 103, 104, 105, 106, 107, 108, 109, 110, 111, 112, 113, 114, 115, 116, or 117. Preferred substitutions of mutated PPO are those that increase the herbicide tolerance of the plant, but leave the biological activity of the oxidase activity substantially unaffected.

[0547] Accordingly, in another object of the present invention the key amino acid residues of a PPO enzyme comprising SEQ ID NO: 1, 2, 3, 4, 5, 6, 7, 8, 9, 10, 11, 12, 13, 14, 15, 16, 17, 18, 19, 20, 21, 22, 23, 24, 25, 26, 27, 28, 29, 30, 31, 32, 33, 34, 35, 36, 37, 38, 39, 40, 41, 42, 43, 44, 45, 46, 47, 48, 49, 50, 51, 52, 53, 54, 55, 56, 57, 58, 59, 60, 61, 62, 63, 64, 65, 66, 67, 68, 69, 70, 71, 72, 73, 74, 75, 76, 77, 78, 79, 80, 81, 82, 83, 84, 85, 86, 87, 88, 89, 90, 91, 92, 93, 94, 95, 96, 97, 98, 99, 100, 101, 102, 103, 104, 105, 106, 107, 108, 109, 110, 111, 112, 113, 114, 115, 116, or 117, a variant, derivative, orthologue, paralogue or homologue thereof, is substituted by any other amino acid.

[0548] In one embodiment, the key amino acid residues of a PPO enzyme, a variant, derivative, orthologue, paralogue or homologue thereof, is substituted by a conserved amino acid as depicted in Table 1.

[0549] It will be understood by the person skilled in the art that amino acids located in a close proximity to the positions of amino acids mentioned below may also be substituted. Thus, in another embodiment the variant of SEQ ID NO: 1, 2, 3, 4, 5, 6, 7, 8, 9, 10, 11, 12, 13, 14, 15, 16, 17, 18, 19, 20, 21, 22, 23, 24, 25, 26, 27, 28, 29, 30, 31, 32, 33, 34, 35, 36, 37, 38, 39, 40, 41, 42, 43, 44, 45, 46, 47, 48, 49, 50, 51, 52, 53, 54, 55, 56, 57, 58, 59, 60, 61, 62, 63, 64, 65, 66, 67, 68, 69, 70, 71, 72, 73, 74, 75, 76, 77, 78, 79, 80, 81, 82, 83, 84, 85, 86, 87, 88, 89, 90, 91, 92, 93, 94, 95, 96, 97, 98, 99, 100, 101, 102, 103, 104, 105, 106, 107, 108, 109, 110, 111, 112, 113, 114, 115, 116, 117, 577, 579, 581, 583, 585, 587, 589, 591, 593, 595, 597, 599, 601, 603, 605, 607, 609, 611, 613, 615, 617, 619, 621, 623, 625, or 627, a variant, derivative, orthologue, paralogue or homologue thereof comprises a mutated PPO, wherein an amino acid ±3, ±2 or ±1 amino acid positions from a key amino acid is substituted by any other amino acid.

[0550] Based on techniques well-known in the art, a highly characteristic sequence pattern can be developed, by means of which further of mutated PPO candidates with the desired activity may be searched.

[0551] Searching for further mutated PPO candidates by applying a suitable sequence pattern would also be encompassed by the present invention. It will be understood by a skilled reader that the present sequence pattern is not limited by the exact distances between two adjacent amino acid residues of said pattern. Each of the distances between two neighbours in the above patterns may, for example, vary independently of each other by up to +10, +5, +3, +2 or +1 amino acid positions without substantially affecting the desired activity.

[0552] Furthermore, by applying the method of site directed mutagenesis, in particular saturation mutagenes (see e.g. Schenk et al., Biospektrum 03/2006, pages 277-279), the inventors of the present invention have identified and generated specific amino acid substitutions and combinations thereof, which—when introduced into a plant by transforming and expressing the respective mutated PPO encoding nucleic acid—confer increased herbicide resistance or tolerance to a phenylpyridine herbicide to said plant.

[0553] Thus, in a particularly preferred embodiment, the variant or derivative of the mutated PPO refers to a polypeptide comprising SEQ ID NO: 1, 2, 3, 4, 5, 6, 7, 8, 9, 10, 11, 12, 13, 14, 15, 16, 17, 18, 19, 20, 21, 22, 23, 24, 25, 26, 27, 28, 29, 30, 31, 32, 33, 34, 35, 36, 37, 38, 39, 40, 41, 42, 43, 44, 45, 46, 47, 48, 49, 50, 51, 52, 53, 54, 55, 56, 57, 58, 59, 60, 61, 62, 63, 64, 65, 66, 67, 68, 69, 70, 71, 72, 73, 74, 75, 76, 77, 78, 79, 80, 81, 82, 83, 84, 85, 86, 87, 88, 89, 90, 91, 92, 93, 94, 95, 96, 97, 98, 99, 100, 101, 102, 103, 104, 105, 106, 107, 108, 109, 110, 111, 112, 113, 114, 115, 116, or 117, comprising a single amino acid substitution at positions depicted in the following Table 2a.

TABLE 2a
Single amino acid substitutions within SEQ ID NO: 1, 2, 3, 4, 5, 6, 7, 8, 9,
10, 11, 12, 13, 14, 15, 16, 17, 18, 19, 20, 21, 22, 23, 24, 25, 26, 27, 28, 29,
30, 31, 32, 33, 34, 35, 36, 37, 38, 39, 40, 41, 42, 43, 44, 45, 46, 47, 48, 49,
50, 51, 52, 53, 54, 55, 56, 57, 58, 59, 60, 61, 62, 63, 64, 65, 66, 67, 68, 69,
70, 71, 72, 73, 74, 75, 76, 77, 78, 79, 80, 81, 82, 83, 84, 85, 86, 87, 88, 89,
90, 91, 92, 93, 94, 95, 96, 97, 98, 99, 100, 101, 102, 103, 104, 105, 106,
107, 108, 109, 110, 111, 112, 113, 114, 115, 116, or 117

| SEQ | | Mutated | Mutated | Mutated | Mutated | Mutated |
|---|---|---|---|---|---|---|
| ID | Organism | site 1 | site 2 | site 3 | site 4 | site 5 |
| 1 | Amaranthus | R128 | G210 | G211 | L397 | F420 |
| | tuberculatus | | | | | |
| 2 | Amaranthus | R128 | G210 | G211 | L397 | F420 |
| | tuberculatus | | | | | |
| 3 | Amaranthus | R128 | G210 | — | L396 | F419 |
| | tuberculatus | | | | | |
| 4 | Amaranthus | R128 | G210 | — | L396 | F419 |
| | tuberculatus | | | | | |
| 5 | Amaranthus | R128 | G210 | G211 | L398 | F421 |
| | hypochondriacus | | | | | |
| 6 | Amaranthus | R98 | G180 | G181 | L368 | F391 |
| | tuberculatus | | | | | |
| 7 | Spinacia oleracea | R127 | G209 | G210 | L397 | F420 |
| 8 | Vitis vinifera | R100 | G182 | G183 | L373 | F396 |
| 9 | Ricinus communis | R99 | A181 | G182 | L372 | F395 |
| 10 | Theobroma cacao | R98 | A180 | G181 | L370 | F393 |
| 11 | Glycine max | R98 | A180 | A181 | L367 | F390 |
| 12 | Prunus persica | R96 | A175 | G176 | L366 | F389 |
| 13 | Medicago truncatula | R98 | A180 | A181 | L367 | F390 |
| 14 | Fragaria vesca | R98 | A177 | G178 | L368 | F391 |
| | subsp. vesca | | | | | |
| 15 | Citrus clementina | R98 | A180 | A181 | L370 | F393 |
| 16 | Citrus clementina | R98 | A180 | A181 | L370 | F393 |
| 17 | Cicer arietinum | R98 | A180 | A181 | L367 | F390 |
| 18 | Cucumis sativus | R98 | A180 | G181 | L368 | F391 |
| 19 | Cucumis sativus | R93 | A175 | G176 | L363 | F386 |
| 20 | Nicotiana tabacum | R98 | G178 | G179 | L369 | F392 |
| 21 | Solanum | R95 | G175 | G176 | L366 | F389 |
| | lycopersicum | | | | | |
| 22 | Arabidopsis thaliana | R101 | A182 | A183 | L371 | F394 |
| 23 | Arabidopsis lyrata | R103 | A186 | A187 | L375 | F398 |
| | subsp. lyrata | | | | | |
| 24 | Arabidopsis thaliana | R101 | A182 | A183 | L364 | F387 |
| 25 | Arabidopsis thaliana | R147 | A228 | A229 | L410 | F433 |
| 26 | Ambrosia | R74 | G151 | G152 | L336 | F359 |
| | artemisiifolia | | | | | |
| 27 | Setaria italica | R128 | A213 | G214 | L408 | F431 |
| 28 | Sorghum bicolor | R130 | A215 | G216 | L410 | F433 |
| 29 | Arabidopsis thaliana | R101 | A152 | A153 | L341 | F364 |
| 30 | Zea mays | R130 | A215 | G216 | L410 | F433 |
| 31 | Zea mays | R130 | A215 | G216 | L410 | F433 |
| 32 | LEMPA | R105 | G188 | G189 | L381 | F404 |
| 33 | LEMPA | R150 | A226 | G227 | L409 | Y432 |
| 34 | Populus trichocarpa | R100 | A182 | G183 | L373 | F396 |
| 35 | Capsella rubella | R165 | A248 | A249 | L433 | F456 |
| 36 | Brachypodium | R134 | A219 | G220 | L414 | F437 |
| | distachyon | | | | | |
| 37 | Oryza sativa | R95 | G179 | G180 | L374 | F397 |
| | Japonica Group | | | | | |
| 38 | Picea sitchensis | R100 | G186 | A187 | L354 | F377 |
| 39 | Solanum tuberosum | R98 | G178 | G179 | L369 | F392 |
| 40 | Oryza sativa Indica | R95 | G190 | G191 | L385 | F408 |
| | Group | | | | | |
| 41 | Oryza sativa | R95 | G190 | G191 | L385 | F408 |
| | Japonica Group | | | | | |
| 42 | Eutrema | R96 | A179 | A180 | L368 | F391 |
| | salsugineum | | | | | |
| 43 | Selaginella | R97 | G175 | S176 | L377 | F400 |
| | moellendorffii | | | | | |
| 44 | Selaginella | R97 | G175 | S176 | L377 | F400 |
| | moellendorffii | | | | | |
| 45 | Amaranthus | R128 | G210 | G211 | — | — |
| | tuberculatus | | | | | |
| 46 | Amaranthus | R128 | G210 | — | — | — |
| | tuberculatus | | | | | |
| 47 | Zea mays | — | A67 | G68 | L262 | F285 |
| 48 | Aegilops tauschii | R30 | A96 | G97 | L291 | F314 |
| 49 | Genlisea aurea | R89 | G168 | G169 | — | — |
| 50 | Amborella | — | — | — | L161 | F184 |
| | trichopoda | | | | | |
| 51 | Rhodothermus | R87 | A162 | G163 | L330 | F353 |
| | marinus | | | | | |
| 52 | Salinibacter ruber | R87 | A161 | G162 | L330 | F353 |
| 53 | Salinibacter ruber | R87 | A161 | G162 | L330 | F353 |
| | M8 | | | | | |
| 54 | Zea mays | — | — | — | L69 | F92 |
| 55 | Rhodothermus | R87 | A162 | G163 | L330 | F353 |
| | marinus | | | | | |
| 56 | Caldithrix abyssi | R86 | A160 | G161 | L329 | F352 |
| 57 | Opitutus terrae | R103 | A178 | G179 | L345 | M368 |
| | PB90-1 | | | | | |
| 58 | Verrucomicrobia | R91 | A166 | G167 | L332 | Y355 |
| | bacterium | | | | | |
| 59 | Ignavibacterium | R88 | A163 | G164 | L332 | F355 |
| | album | | | | | |
| 60 | Coraliomargarita sp. | R88 | G163 | A164 | L331 | Y354 |
| | CAG:312 | | | | | |
| 61 | Salisaeta longa | R88 | A163 | G164 | L329 | F352 |
| 62 | Ambrosia | R98 | G175 | G176 | — | — |
| | artemisiifolia | | | | | |
| 63 | Melioribacter roseus | R88 | A163 | G164 | L333 | F356 |
| | P3M-2 | | | | | |
| 64 | Halothiobacillus | R97 | A170 | G171 | L343 | F366 |
| | neapolitanus c2 | | | | | |
| 65 | Chondrus crispus | Y98 | S176 | G177 | L352 | Y376 |
| 66 | Rubritalea marina | R88 | A163 | G164 | L339 | M362 |
| 67 | Acidobacteria | R88 | A161 | G162 | L330 | F353 |
| | bacterium | | | | | |
| 68 | Coraliomargarita | R88 | A163 | G164 | L323 | F346 |
| | akajimensis DSM | | | | | |
| | 45221 | | | | | |
| 69 | Oscillochloris | R90 | S164 | G165 | L340 | L363 |
| | trichoides DG6 | | | | | |
| 70 | Opitutaceae | R86 | A161 | G162 | L352 | L375 |
| | bacterium TAV1 | | | | | |
| 71 | Amborella | R87 | A173 | A174 | L230 | — |
| | trichopoda | | | | | |
| 72 | Opitutaceae | R105 | A180 | G181 | L368 | L391 |
| | bacterium TAV5 | | | | | |
| 73 | Chloroflexus sp. | R91 | A166 | G167 | L335 | L358 |
| | Y-400-fl | | | | | |
| 74 | Leptospirillum sp. | R92 | A167 | S168 | L335 | F358 |
| | Group II ‘5-way | | | | | |
| | CG’ | | | | | |
| 75 | Leptospirillum | R92 | A167 | S168 | L335 | F358 |
| | ferriphilum ML-04 | | | | | |
| 76 | Verrucomicrobia | R89 | A165 | A166 | L334 | Y357 |
| | bacterium SCGC | | | | | |
| | AAA300-O17 | | | | | |
| 77 | Chloroflexus | R92 | A167 | G168 | L336 | L359 |
| | aggregans | | | | | |
| | DSM 9485 | | | | | |
| 78 | Desulfurobacterium | R86 | A161 | G162 | L333 | M356 |
| | thermolithotrophum | | | | | |
| 79 | Desulfurobacterium | R90 | A165 | G166 | L332 | M355 |
| | sp. TC5-1 | | | | | |
| 80 | Arthrospira | R93 | A176 | G177 | L352 | Y375 |
| | platensis C1 | | | | | |
| 81 | Leptospirillum sp. | R92 | A167 | S168 | L335 | F358 |
| | Group II ‘C75’ | | | | | |
| 82 | Verrucomicrobiae | R87 | A164 | G165 | L332 | M355 |
| | bacterium DG1235 | | | | | |
| 83 | Verrucomicrobia | R89 | A165 | A166 | L334 | F357 |
| | bacterium SCGC | | | | | |
| | AAA300-K03 | | | | | |
| 84 | Synechococcus sp. | R101 | A177 | G178 | L350 | F373 |
| | JA-3-3Ab | | | | | |
| 85 | Hymenobacter | R86 | A161 | G162 | A321 | F344 |
| | norwichensis | | | | | |
| 86 | Pontibacter sp. | R85 | G159 | G160 | S319 | Y342 |
| | BAB1700 | | | | | |
| 87 | Leptospirillum | R92 | A172 | S173 | L339 | F362 |
| | ferrodiazotrophum | | | | | |
| 88 | Prevotella histicola | C89 | A164 | G165 | L328 | F351 |
| | F0411 | | | | | |
| 89 | Flexithrix dorotheae | R84 | A158 | G159 | A313 | F336 |
| 90 | Geobacter | R93 | A168 | G169 | L342 | M365 |
| | metallireducens | | | | | |
| | GS-15 | | | | | |
| 91 | Synechococcus sp. | R93 | A169 | G170 | L362 | F385 |
| | JA-2-3B'a(2-13) | | | | | |
| 92 | Crinalium | R85 | A168 | G169 | L344 | F367 |
| | epipsammum | | | | | |
| | PCC 9333 | | | | | |
| 93 | Planctomyces maris | A99 | T187 | S188 | F358 | F381 |
| 94 | Geobacter | R93 | A170 | G171 | L344 | M367 |
| | uraniireducens Rf4 | | | | | |
| 95 | Acidithiobacillus | R87 | A162 | G163 | L323 | F346 |
| | ferrivorans | | | | | |
| 96 | Prevotella | C88 | A163 | G164 | L327 | F350 |
| | melaninogenica | | | | | |
| 97 | Thermovibrio | R86 | A160 | G161 | L333 | M356 |
| | ammonificans | | | | | |
| 98 | Brassica_rapa | R143 | A219 | G220 | L402 | Y425 |
| 99 | Brassica_rapa | R112 | A195 | A196 | L384 | F407 |
| 100 | Gossypium | R146 | A222 | G223 | L405 | Y428 |
| 101 | Gossypium | R98 | A180 | G181 | L370 | F393 |
| 102 | Conyza_canadensis | R142 | A218 | G219 | L401 | Y424 |
| 103 | Conyza_canadensis | R102 | G179 | G180 | L365 | F388 |
| 104 | Kochia_scobaria | R172 | A248 | G249 | L431 | F454 |
| 105 | Lolium_rigidum | R138 | A214 | G215 | L397 | Y420 |
| 106 | Lolium_rigidum | R97 | A182 | G183 | L377 | F400 |
| 107 | Gossypium | R146 | A222 | G223 | L405 | Y428 |
| | hirsutum PPO1 | | | | | |
| 108 | Beta vulgaris PPO1 | R167 | A243 | G244 | L426 | Y449 |
| 109 | Hordeum vulgare | R137 | A213 | G214 | L396 | Y419 |
| | PPO1 | | | | | |
| 110 | Hordeum vulgare | R142 | A227 | G228 | L422 | F445 |
| | PPO2 | | | | | |
| 111 | Triticum aestivum | R138 | A214 | G215 | L397 | Y420 |
| | PPO1 | | | | | |
| 112 | Solanum | R95 | G175 | G176 | L366 | F389 |
| | lycopersicum PPO2 | | | | | |
| 113 | Triticum aestivum | R153 | A229 | G230 | L412 | Y435 |
| | PPO1_v2 | | | | | |
| 114 | Gossypium | R146 | A222 | G223 | L405 | Y428 |
| | hirsutum PPO1_v2 | | | | | |
| 115 | Gossypium | R98 | A180 | G181 | L370 | F393 |
| | hirsutum PPO2 | | | | | |
| 116 | Beta vulgaris | R167 | A243 | G244 | L426 | Y449 |
| | PPO1_v2 | | | | | |
| 117 | Brassica | R99 | A182 | A183 | L371 | F394 |
| | napus_PPO2 | | | | | |

[0554] In a further particularly preferred embodiment, the variant or derivative of the mutated PPO refers to SEQ ID NO: 1, 2, 3, 4, 5, 6, 7, 8, 9, 10, 11, 12, 13, 14, 15, 16, 17, 18, 19, 20, 21, 22, 23, 24, 25, 26, 27, 28, 29, 30, 31, 32, 33, 34, 35, 36, 37, 38, 39, 40, 41, 42, 43, 44, 45, 46, 47, 48, 49, 50, 51, 52, 53, 54, 55, 56, 57, 58, 59, 60, 61, 62, 63, 64, 65, 66, 67, 68, 69, 70, 71, 72, 73, 74, 75, 76, 77, 78, 79, 80, 81, 82, 83, 84, 85, 86, 87, 88, 89, 90, 91, 92, 93, 94, 95, 96, 97, 98, 99, 100, 101, 102, 103, 104, 105, 106, 107, 108, 109, 110, 111, 112, 113, 114, 115, 116, or 117, comprising a single amino acid substitutions at the positions depicted in the following Table 2b.

[0555] It should be noted that Mutated site 1 of Table 2a) corresponds to Pos 1 of Table 2b); Mutated site 2 of Table 2a) corresponds to Pos 16 of Table 2b); Mutated site 3 of Table 2a) corresponds to Pos 17 of Table 2b); Mutated site 4 of Table 2a) corresponds to Pos 38 of Table 2b); Mutated site 5 of Table 2a) corresponds to Pos 42 of Table 2b).

TABLE 2b

| | Pos | Pos | Pos | Pos | Pos | Pos | Pos | Pos | Pos | Pos | Pos | Pos | Pos | Pos | Pos | Pos | Pos | Pos | Pos |
|---|---|---|---|---|---|---|---|---|---|---|---|---|---|---|---|---|---|---|---|
| ID | 1 | 2 | 3 | 4 | 5 | 6 | 7 | 8 | 9 | 10 | 11 | 12 | 13 | 14 | 15 | 16 | 17 | 18 | 19 |
| 1 | R128 | Y129 | A131 | S149 | I151 | A154 | P164 | K169 | E182 | S183 | E189 | F196 | D202 | C209 | G210 | G211 | L216 | M218 | H219 |
| 2 | R128 | Y129 | A131 | S149 | I151 | A154 | P164 | K169 | E182 | S183 | E189 | F196 | D202 | C209 | G210 | G211 | L216 | M218 | H219 |
| 3 | R128 | Y129 | A131 | S149 | I151 | A154 | P164 | K169 | E182 | S183 | E189 | F196 | D202 | C209 | G210 | — | L215 | M217 | H218 |
| 4 | R128 | Y129 | A131 | S149 | I151 | A154 | P164 | K169 | E182 | S183 | E189 | F196 | D202 | C209 | G210 | — | L215 | M217 | Y218 |
| 5 | R128 | Y129 | A131 | S149 | I151 | A154 | P164 | K169 | E182 | S183 | E189 | F196 | D202 | C209 | G210 | G211 | L216 | V218 | H219 |
| 6 | R98 | Y99 | A101 | S119 | I121 | A124 | P134 | K139 | E152 | S153 | E159 | F166 | D172 | C179 | G180 | G181 | L186 | M188 | H189 |
| 7 | R127 | Y128 | A130 | S148 | I150 | A153 | P163 | K168 | E181 | S182 | E188 | F195 | D201 | S208 | G209 | G210 | L215 | M217 | R218 |
| 8 | R100 | Y101 | V103 | S121 | I123 | A126 | P136 | K141 | E154 | S155 | Q161 | V168 | D174 | S181 | G182 | G183 | L188 | M190 | H191 |
| 9 | R99 | Y100 | V102 | S120 | I122 | A125 | P135 | K140 | E153 | S154 | Q160 | V167 | D173 | S180 | A181 | G182 | L187 | V189 | C190 |
| 10 | R98 | Y99 | V101 | S119 | I121 | A124 | P134 | K139 | E152 | S153 | Q159 | V166 | D172 | S179 | A180 | G181 | L186 | M188 | R189 |
| 11 | R98 | Y99 | V101 | S119 | L121 | A124 | P134 | R139 | E152 | S153 | E159 | V166 | D172 | S179 | A180 | A181 | L186 | M188 | R189 |
| 12 | R96 | Y97 | V99 | S117 | F119 | A122 | P132 | D137 | E147 | S148 | Q154 | V161 | D167 | S174 | A175 | G176 | L181 | M183 | R184 |
| 13 | R98 | Y99 | V101 | S119 | L121 | A124 | P134 | R139 | E152 | S153 | E159 | V166 | D172 | S179 | A180 | A181 | L186 | I188 | R189 |
| 14 | R98 | Y99 | A101 | S119 | F121 | T124 | P134 | K139 | E149 | S150 | Q156 | V163 | D169 | S176 | A177 | G178 | L183 | M185 | P186 |
| 15 | R98 | Y99 | V101 | S119 | F121 | A124 | P134 | K139 | E152 | S153 | Q159 | V166 | D172 | S179 | A180 | A181 | L186 | M188 | R189 |
| 16 | R98 | Y99 | V101 | S119 | F121 | A124 | P134 | K139 | E152 | S153 | Q159 | V166 | D172 | S179 | A180 | A181 | L186 | M188 | R189 |
| 17 | R98 | Y99 | V101 | S119 | L121 | A124 | P134 | R139 | E152 | S153 | E159 | V166 | D172 | S179 | A180 | A181 | L186 | M188 | R189 |
| 18 | R98 | Y99 | V101 | S119 | F121 | A124 | P134 | K139 | E152 | S153 | Q159 | V166 | D172 | S179 | A180 | G181 | L186 | M188 | 8189 |
| 19 | R93 | Y94 | V96 | S114 | F116 | A119 | P129 | K134 | E147 | S148 | Q154 | V161 | D167 | S174 | A175 | G176 | L181 | M183 | S184 |
| 20 | R98 | Y99 | A101 | S119 | F121 | T124 | P134 | N139 | E150 | S151 | Q157 | V164 | D170 | C177 | G178 | G179 | L184 | M186 | H187 |
| 21 | R95 | Y96 | A98 | S116 | F118 | T121 | P131 | N136 | E147 | S148 | Q154 | V161 | D167 | C174 | G175 | G176 | L181 | M183 | H184 |
| 22 | R101 | Y102 | V104 | S122 | V124 | T127 | P137 | K142 | E154 | S155 | Q161 | V168 | D174 | S181 | A182 | A183 | L188 | M190 | K191 |
| 23 | R103 | Y104 | V106 | S124 | V126 | T129 | P139 | K144 | E158 | S159 | Q165 | V172 | D178 | S185 | A186 | A187 | L192 | M194 | K195 |
| 24 | R101 | Y102 | V104 | S122 | V124 | T127 | P137 | K142 | E154 | S155 | Q161 | V168 | D174 | S181 | A182 | A183 | L188 | M190 | K191 |
| 25 | R147 | Y148 | V150 | S168 | V170 | T173 | P183 | K188 | E200 | S201 | C207 | V214 | D220 | S227 | A228 | A229 | L234 | M236 | K237 |
| 26 | R74 | Y75 | V77 | S95 | F97 | T100 | P110 | K115 | E123 | S124 | Q130 | V137 | D143 | S150 | G151 | G152 | L157 | M159 | R160 |
| 27 | R128 | Y129 | V131 | S149 | V151 | T154 | P164 | K169 | E185 | S186 | E192 | V199 | D205 | S212 | A213 | G214 | L219 | I221 | R222 |
| 28 | R130 | Y131 | V133 | S151 | V153 | T156 | P166 | K171 | E187 | S188 | E194 | V201 | D207 | S214 | A215 | G216 | L221 | I223 | C224 |
| 29 | R101 | Y102 | V104 | — | — | — | — | — | E124 | S125 | Q131 | V138 | D144 | S151 | A152 | A153 | L158 | M160 | K161 |
| 30 | R130 | Y131 | V133 | S151 | V153 | T156 | P166 | K171 | E187 | S188 | E194 | V201 | D207 | S214 | A215 | G216 | L221 | I223 | R224 |
| 31 | R130 | Y131 | V133 | S151 | V153 | T156 | P166 | K171 | E187 | S188 | E194 | V201 | D207 | S214 | A215 | G216 | L221 | I223 | R224 |
| 32 | R105 | Y106 | V108 | S126 | L128 | T131 | P141 | R146 | E160 | S161 | Q167 | V174 | D180 | S187 | G188 | G189 | L194 | M196 | P197 |
| 33 | R150 | F151 | L153 | F171 | L173 | 1176 | A186 | P191 | E201 | E202 | — | V212 | E218 | Y225 | A226 | G227 | L232 | M234 | K235 |
| 34 | R100 | Y101 | V103 | S121 | F123 | A126 | P136 | K141 | E154 | S155 | Q161 | V168 | D174 | S181 | A182 | G183 | L188 | A190 | R191 |
| 35 | R165 | Y166 | V168 | S186 | V188 | T191 | P201 | K206 | E220 | S221 | R227 | V234 | D240 | S247 | A248 | A249 | L254 | M277 | K278 |
| 36 | R134 | Y135 | V137 | S155 | V157 | T160 | P170 | K175 | E191 | S192 | E198 | V205 | D211 | S218 | A219 | G220 | L225 | I227 | R228 |
| 37 | R95 | Y96 | V98 | S116 | V118 | T121 | P131 | K136 | E152 | S153 | C158 | V165 | D171 | S178 | G179 | G180 | L185 | I187 | R188 |
| 38 | R100 | Y101 | V103 | S121 | T123 | A126 | P136 | H141 | E158 | S159 | R165 | V172 | D178 | A185 | G186 | A187 | L192 | I194 | R195 |
| 39 | R98 | Y99 | A101 | S119 | F121 | T124 | P134 | N139 | E150 | S151 | Q157 | V164 | D170 | C177 | G178 | G179 | L184 | M186 | H187 |
| 40 | R95 | Y96 | V98 | S116 | V118 | T121 | P131 | K136 | E152 | 8153 | C169 | V176 | D182 | S189 | G190 | G191 | L196 | I198 | R199 |
| 41 | R95 | Y96 | V98 | S116 | V118 | T121 | P131 | K136 | E152 | S153 | C169 | V176 | D182 | S189 | G190 | G191 | L196 | I198 | R199 |
| 42 | R96 | Y97 | V99 | S117 | V119 | T122 | P132 | K137 | E151 | S152 | Q158 | V165 | D171 | S178 | A179 | A180 | L185 | M187 | K188 |
| 43 | R97 | Y98 | V100 | T118 | L120 | A123 | P133 | R138 | E147 | S148 | E154 | I161 | D167 | S174 | G175 | S176 | I181 | I183 | R184 |
| 44 | R97 | Y98 | V100 | T118 | L120 | A123 | P133 | R138 | E147 | S148 | E154 | I161 | D167 | S174 | G175 | S176 | I181 | I183 | R184 |
| 45 | R128 | Y129 | A131 | S149 | I151 | A154 | P164 | K169 | E182 | S183 | E189 | F196 | D202 | C209 | G210 | G211 | L216 | M218 | H219 |
| 46 | R128 | Y129 | A131 | S149 | I151 | A154 | P164 | K169 | E182 | S183 | E189 | F196 | D202 | C209 | G210 | — | L215 | M217 | H218 |
| 47 | — | — | — | S3 | V5 | T8 | P18 | K23 | E39 | S40 | E46 | V53 | D59 | S66 | A67 | G68 | L73 | I75 | R76 |
| 48 | R30 | Y31 | V33 | — | — | — | P47 | K52 | E68 | S69 | E75 | V82 | D88 | S95 | A96 | G97 | L102 | I104 | R105 |
| 49 | R89 | Y90 | V92 | S110 | I112 | S115 | P125 | Q130 | E140 | S141 | Q147 | V154 | D160 | S167 | G168 | G169 | L174 | M176 | R177 |
| 50 | — | — | — | — | — | — | — | — | — | — | — | — | — | — | — | — | — | — | — |
| 51 | R87 | F88 | V90 | T108 | L110 | P113 | P123 | H126 | A137 | K138 | — | V148 | E154 | F161 | A162 | G163 | L168 | V170 | R171 |
| 52 | R87 | Y88 | V90 | T108 | L110 | T113 | P123 | G126 | A136 | R137 | — | V147 | A153 | F160 | A161 | G162 | L167 | V169 | Q170 |
| 53 | R87 | Y88 | V90 | T108 | L110 | T113 | P123 | G126 | A136 | R137 | — | V147 | A153 | F160 | A161 | G162 | L167 | V169 | Q170 |
| 54 | — | — | — | — | — | — | — | — | — | — | — | — | — | — | — | — | — | — | — |
| 55 | R87 | F88 | V90 | T108 | L110 | P113 | P123 | H126 | A137 | K138 | — | V148 | E154 | F161 | A162 | G163 | L168 | V170 | R171 |
| 56 | R86 | Y87 | V89 | T107 | L109 | W112 | P122 | P125 | A135 | D136 | — | F146 | N152 | Y159 | A160 | G161 | L166 | A168 | P169 |
| 57 | R103 | Y104 | V106 | S124 | L126 | P129 | L139 | R142 | A153 | E154 | — | F164 | N170 | Y177 | A178 | G179 | L184 | A186 | R187 |
| 58 | R91 | Y92 | I94 | T112 | L114 | L117 | P127 | A130 | A141 | A142 | — | F152 | N158 | Y165 | A166 | G167 | L172 | V174 | Q175 |
| 59 | R88 | Y89 | L91 | T109 | L111 | A114 | P124 | G127 | A138 | E139 | — | F149 | N155 | Y162 | A163 | G164 | L169 | V171 | K172 |
| 60 | R88 | F89 | A91 | T109 | L111 | F114 | P124 | K127 | A138 | D139 | — | V149 | N155 | Y162 | G163 | A164 | L169 | I171 | K172 |
| 61 | R88 | F89 | V91 | T109 | L111 | T114 | P124 | A127 | A138 | S139 | — | V149 | D155 | F162 | A163 | G164 | L169 | L171 | K172 |
| 62 | R98 | Y99 | V101 | 8119 | F121 | T124 | P134 | K139 | E147 | S148 | Q154 | V161 | D167 | D174 | G175 | G176 | — | — | — |
| 63 | R88 | Y89 | L91 | T109 | L111 | S114 | P124 | S127 | A138 | E139 | — | F149 | D155 | F162 | A163 | G164 | L169 | V171 | K172 |
| 64 | R97 | F98 | A100 | S118 | L120 | M123 | A133 | K136 | A145 | E146 | — | F156 | D162 | Y169 | A170 | G171 | L176 | V178 | Q179 |
| 65 | Y98 | Y99 | M101 | T119 | L121 | W124 | P134 | L139 | S149 | V150 | Q155 | V162 | D168 | Y175 | S176 | G177 | L182 | M184 | K185 |
| 66 | R88 | F89 | I91 | S109 | I111 | L114 | P124 | K127 | A138 | D139 | — | P149 | N155 | Y162 | A163 | G164 | L169 | V171 | E172 |
| 67 | R88 | Y89 | V91 | S109 | L111 | W114 | P124 | G127 | A136 | D137 | — | F147 | N153 | Y160 | A161 | G162 | L167 | V169 | R170 |
| 68 | R88 | Y89 | V91 | T109 | L111 | I114 | P124 | K127 | A138 | D139 | — | L149 | N155 | Y162 | A163 | G164 | L169 | L171 | R172 |
| 69 | R90 | Y91 | L93 | M111 | H113 | M116 | P126 | P129 | A139 | S140 | — | V150 | D156 | Y163 | S164 | G165 | M170 | I172 | K173 |
| 70 | R86 | F87 | V89 | T107 | L109 | L112 | L122 | R125 | G136 | E137 | — | L147 | D153 | Y160 | A161 | G162 | L167 | A169 | R170 |
| 71 | R87 | F88 | A90 | S108 | L110 | P113 | P123 | S128 | E145 | S146 | Q152 | V159 | D165 | S172 | A173 | A174 | L179 | — | — |
| 72 | R105 | F106 | V108 | T126 | L128 | L131 | L141 | R144 | G155 | E156 | — | L166 | D172 | Y179 | A180 | G181 | L186 | A188 | R189 |
| 73 | R91 | F92 | L94 | T112 | L114 | W117 | P127 | N130 | A141 | A142 | — | A152 | D158 | Y165 | A166 | G167 | L172 | T174 | A175 |
| 74 | R92 | Y93 | V95 | T113 | L115 | W118 | W128 | P131 | S142 | H143 | — | A153 | D159 | Y166 | A167 | G168 | L173 | V175 | E176 |
| 75 | R92 | Y93 | V95 | T113 | L115 | W118 | W128 | P131 | S142 | H143 | — | A153 | D159 | Y166 | A167 | G168 | L173 | V175 | E176 |
| 76 | R89 | F90 | I92 | S110 | F112 | P115 | P125 | G128 | A140 | E141 | — | V151 | N157 | Y164 | A165 | A166 | L171 | L173 | K174 |
| 77 | R92 | Y93 | L95 | T113 | L115 | W118 | P128 | N131 | A142 | A143 | — | A153 | D159 | Y166 | A167 | G168 | L173 | A175 | A176 |
| 70 | R86 | F87 | Y89 | S107 | L109 | W112 | F122 | P125 | S136 | E137 | — | A147 | D153 | F160 | A161 | G162 | L167 | L169 | K170 |
| 79 | R90 | F91 | F93 | S111 | V113 | F116 | Y126 | P129 | S140 | S141 | — | A151 | D157 | F164 | A165 | G166 | L171 | V173 | K174 |
| 80 | R93 | Y94 | Y96 | S114 | L116 | A119 | A129 | P134 | T151 | Q152 | — | V162 | Q168 | Y175 | A176 | G177 | L182 | V184 | R185 |
| 81 | R92 | Y93 | V95 | T113 | L115 | W118 | W128 | P131 | S142 | H143 | — | A153 | D159 | Y166 | A167 | S168 | L173 | V175 | E176 |
| 82 | R87 | Y88 | V90 | T10B | L110 | L113 | P123 | K126 | A139 | S140 | — | F150 | D156 | Y163 | A164 | G165 | L170 | L172 | E173 |
| 83 | R89 | F90 | I92 | S110 | F112 | P115 | P125 | G128 | A140 | E141 | — | V151 | N157 | Y164 | A165 | A166 | L171 | L173 | K174 |
| 84 | R101 | Y102 | Y104 | S122 | L124 | V127 | L137 | P142 | R152 | Q153 | — | V163 | E169 | Y176 | A177 | G178 | L183 | A185 | V186 |
| 85 | R86 | Y87 | L89 | N107 | F109 | W112 | L122 | A126 | D136 | A137 | — | I147 | N153 | Y160 | A161 | G162 | L167 | I169 | H170 |
| 86 | R85 | Y86 | L88 | N106 | L108 | N111 | R121 | A126 | S134 | D135 | — | Q145 | A151 | Y158 | G159 | G160 | L165 | V167 | N168 |
| 87 | R92 | F93 | L95 | T113 | I115 | L118 | P128 | P131 | A147 | D148 | — | F158 | D164 | Y171 | A172 | S173 | L178 | M180 | A181 |
| 88 | C89 | R90 | I92 | T111 | L113 | L116 | P126 | R129 | G139 | A140 | — | F150 | D156 | Y163 | A164 | G165 | L170 | T172 | R173 |
| 89 | R84 | Y85 | F87 | N105 | F107 | W110 | L120 | T125 | A133 | D134 | — | I144 | N150 | Y157 | A158 | G159 | L164 | M166 | E167 |
| 90 | R93 | F94 | Y96 | S114 | L116 | W119 | P129 | S132 | A143 | S144 | — | A154 | 8160 | F167 | A168 | G169 | M174 | L176 | R177 |
| 91 | R93 | Y94 | Y96 | S114 | L116 | V119 | L129 | A134 | R144 | Q145 | — | V155 | E161 | Y168 | A169 | G170 | L175 | A177 | L178 |
| 92 | R85 | F86 | Y88 | S106 | L108 | L111 | A121 | P126 | A143 | Q144 | — | V154 | A160 | Y167 | A168 | G169 | L174 | A176 | R177 |
| 93 | A99 | L100 | L102 | T128 | L130 | P133 | Y143 | P146 | A162 | Q163 | — | A173 | 0179 | Y186 | T187 | S188 | L193 | L195 | R196 |
| 94 | R93 | F94 | Y96 | S114 | L116 | W119 | P129 | A134 | A145 | A146 | — | A156 | A162 | F169 | A170 | G171 | M176 | L178 | V179 |
| 95 | R87 | Y88 | L90 | G107 | L109 | W112 | P122 | 3125 | A137 | D138 | — | A148 | D154 | F161 | A162 | G163 | L168 | V170 | Q171 |
| 96 | C88 | R89 | I91 | T110 | L112 | L115 | P125 | K128 | G138 | S139 | — | F149 | D155 | Y162 | A163 | G164 | L169 | T171 | R172 |
| 97 | R86 | F87 | Y89 | S107 | L109 | W112 | L122 | P125 | A135 | E136 | — | A146 | D152 | F159 | A160 | G161 | M166 | L168 | K169 |
| 98 | R143 | F144 | L146 | F164 | L166 | I169 | A179 | P184 | E191 | S192 | R198 | V205 | E211 | Y218 | A219 | G220 | L225 | M227 | K228 |
| 99 | R112 | Y113 | V115 | S133 | V135 | T138 | P148 | K153 | E167 | S168 | Q174 | V181 | D187 | S194 | A195 | A196 | L201 | M203 | K204 |
| 100 | R146 | F147 | L149 | F167 | L169 | I172 | A182 | P187 | E194 | S195 | R201 | V208 | E214 | Y221 | A222 | G223 | L228 | M230 | K231 |
| 101 | R98 | Y99 | V101 | S119 | I121 | A124 | P134 | K139 | E152 | S153 | Q159 | V166 | D172 | S179 | A180 | G181 | L186 | M188 | C189 |
| 102 | R142 | F143 | L145 | F163 | L165 | L168 | A178 | P183 | E190 | S191 | R197 | V204 | E210 | Y217 | A218 | G219 | L224 | M226 | K227 |
| 103 | R102 | Y103 | V105 | S123 | L125 | T128 | P138 | K143 | E151 | S152 | Q158 | V165 | N171 | S178 | G179 | G180 | L185 | M187 | R188 |
| 104 | R172 | F173 | L175 | F193 | L195 | F198 | A208 | P213 | E220 | S221 | R227 | V234 | E240 | Y247 | A248 | G249 | L254 | M256 | K257 |
| 105 | R138 | F139 | L141 | F159 | L161 | I164 | A174 | P179 | E186 | S187 | R193 | V200 | E206 | Y213 | A214 | G215 | L220 | M222 | R223 |
| 106 | R97 | Y98 | V100 | S118 | L120 | T123 | P133 | K138 | E154 | S155 | E161 | V168 | D174 | S181 | A182 | G183 | L188 | I190 | R191 |
| 107 | R146 | F147 | L149 | F167 | L169 | I172 | A182 | P187 | E194 | S195 | R201 | V208 | E214 | Y221 | A222 | G223 | L228 | M230 | K231 |
| 108 | R167 | F168 | L170 | F188 | L190 | I193 | A203 | P208 | E215 | S216 | R222 | V229 | E235 | Y242 | A243 | G244 | L249 | M251 | K252 |
| 109 | R137 | F138 | L140 | F158 | L160 | V163 | A173 | P178 | E185 | S186 | R192 | V199 | E205 | Y212 | A213 | G214 | L219 | M221 | K222 |
| 110 | R142 | Y143 | V145 | S163 | V165 | T168 | P178 | K183 | E199 | S200 | E206 | V213 | D219 | S226 | A227 | G228 | L233 | I235 | R236 |
| 111 | R138 | F139 | L141 | F159 | L161 | I164 | A174 | P179 | E186 | S187 | R193 | V200 | E206 | Y213 | A214 | G215 | L220 | M222 | K223 |
| 112 | R95 | Y96 | A98 | S116 | F118 | T121 | P131 | N136 | E147 | S148 | Q154 | V161 | D167 | C174 | G175 | G176 | L181 | M183 | H184 |
| 113 | R153 | F154 | L156 | F174 | L176 | I179 | A189 | P194 | E201 | S202 | R208 | V215 | E221 | Y228 | A229 | G230 | L235 | M237 | K238 |
| 114 | R146 | F147 | L149 | F167 | L169 | I172 | A182 | P187 | E194 | S195 | R201 | V208 | E214 | Y221 | A222 | G223 | L228 | M230 | K231 |
| 115 | R98 | Y99 | M101 | S119 | I121 | A124 | P134 | N139 | E152 | S153 | Q159 | V166 | 0172 | S179 | A180 | G181 | L186 | M188 | C189 |
| 116 | R167 | F168 | L170 | F188 | L190 | I193 | A203 | P208 | E215 | S216 | R222 | V229 | E235 | Y242 | A243 | G244 | L249 | M251 | K252 |
| 117 | R99 | Y100 | V102 | S120 | V122 | T125 | P135 | N141 | E154 | S155 | Q161 | V168 | D174 | S181 | A182 | A183 | L188 | M190 | K191 |
| | Pos | Pos | Pos | Pos | Pos | Pos | Pos | Pos | Pos | Pos | Pos | Pos | Pos | Pos | Pos | Pos | Pos | Pos | Pos |
| ID | 20 | 21 | 22 | 23 | 24 | 25 | 26 | 27 | 28 | 29 | 30 | 31 | 32 | 33 | 34 | 35 | 36 | 37 | 38 |
| 1 | H220 | N227 | S234 | S246 | K259 | P260 | R261 | L295 | Q301 | G308 | S324 | R335 | G346 | F349 | L351 | D352 | T358 | L384 | L397 |
| 2 | H220 | N227 | S234 | S246 | K259 | P260 | R261 | L295 | Q301 | G308 | S324 | R335 | G346 | F349 | L351 | D352 | T358 | L384 | L397 |
| 3 | H219 | N226 | S233 | S245 | K258 | P259 | R260 | L294 | Q300 | G307 | S323 | R334 | G345 | F348 | L350 | D351 | T357 | L383 | L396 |
| 4 | H219 | N226 | S233 | S245 | K258 | P259 | R260 | L294 | Q300 | G307 | S323 | R334 | G045 | F348 | L350 | D351 | T357 | L383 | L396 |
| 5 | H220 | N227 | S234 | S246 | K260 | P261 | R262 | L296 | Q302 | G309 | S325 | R336 | G347 | F350 | L352 | D353 | T359 | L385 | L398 |
| 6 | H190 | N197 | S204 | S216 | K230 | P231 | R232 | L266 | Q272 | G279 | S295 | R306 | G017 | F320 | L322 | D323 | S329 | L355 | L368 |
| 7 | H219 | N226 | S233 | S245 | K259 | P260 | R261 | L295 | H301 | E308 | P324 | N335 | E346 | F349 | L351 | D352 | S358 | L384 | L397 |
| 8 | H192 | N199 | S206 | A218 | K232 | K234 | R235 | L269 | H275 | E282 | S300 | C311 | G322 | F325 | L327 | D328 | S334 | L360 | L373 |
| 9 | H191 | N198 | S205 | T217 | K231 | K233 | Q234 | F268 | P274 | E281 | S299 | C310 | R321 | F324 | L326 | N327 | S333 | L359 | L372 |
| 10 | H190 | D197 | S204 | A216 | K229 | K231 | P232 | L266 | H272 | E279 | S297 | C308 | G319 | F322 | L324 | N325 | S331 | L357 | L370 |
| 11 | H190 | N197 | S204 | A216 | K230 | K232 | H233 | L267 | H273 | Q280 | D294 | Y305 | G316 | F319 | L321 | N322 | S328 | L354 | L367 |
| 12 | H185 | N192 | S199 | A211 | K225 | K227 | R228 | L262 | Q268 | E275 | S293 | C304 | G015 | F318 | L320 | D321 | V327 | L353 | L366 |
| 13 | H190 | N197 | S204 | G216 | K230 | K232 | H233 | L267 | H273 | Q280 | D294 | G305 | G316 | F319 | L321 | N322 | T328 | L354 | L367 |
| 14 | H187 | N194 | S201 | S213 | K227 | K229 | R230 | L264 | H270 | E277 | S295 | C306 | G017 | F320 | L322 | D323 | N329 | L355 | L368 |
| 15 | H190 | N197 | S204 | A216 | K230 | H232 | R233 | L267 | H273 | E280 | S297 | C308 | G319 | F322 | L324 | D325 | I331 | L357 | L370 |
| 16 | H190 | N197 | S204 | A216 | K230 | H232 | R233 | L267 | H273 | E280 | S297 | C308 | G319 | F322 | L324 | D325 | I331 | L357 | L370 |
| 17 | H190 | N197 | S204 | G216 | K230 | K232 | H233 | L267 | H273 | E280 | D294 | G305 | G316 | F319 | L321 | N322 | T328 | L354 | L367 |
| 18 | H190 | N197 | S204 | T216 | K230 | K232 | P233 | L267 | — | Q279 | I295 | C306 | G017 | F320 | L322 | N323 | A329 | L355 | L368 |
| 19 | H185 | N192 | S199 | T211 | K225 | K227 | P228 | L262 | — | Q274 | I290 | C301 | G312 | F315 | L317 | N318 | A324 | L350 | L363 |
| 20 | H188 | N195 | S202 | P214 | N228 | K230 | R231 | L265 | C271 | D278 | S296 | C307 | G018 | F321 | L323 | N324 | D330 | L356 | L369 |
| 21 | L185 | N192 | S199 | P211 | N225 | K227 | R228 | L262 | C268 | D275 | S293 | C304 | G015 | F318 | L320 | N321 | D327 | L353 | L366 |
| 22 | H192 | N199 | S206 | A218 | T232 | K234 | G235 | L269 | — | E280 | H298 | C309 | G320 | F323 | L325 | N326 | N332 | L358 | L371 |
| 23 | H196 | N203 | S210 | A222 | T236 | R238 | G239 | L273 | — | F284 | H302 | C313 | G324 | F327 | L329 | N330 | N336 | L362 | L375 |
| 24 | H192 | N199 | S203 | A215 | T229 | K231 | G232 | L266 | — | E277 | H295 | C302 | G313 | F316 | L318 | N319 | N325 | L351 | L364 |
| 25 | H238 | N245 | S249 | A261 | T275 | K277 | G278 | L312 | — | E323 | H341 | C348 | G359 | F362 | L364 | N365 | N371 | L397 | L410 |
| 26 | H161 | D168 | S175 | S187 | N197 | K199 | R200 | L234 | C240 | G246 | S263 | N274 | G285 | F288 | L290 | N291 | S297 | L323 | L336 |
| 27 | H223 | N230 | S237 | A249 | K263 | R265 | N266 | L300 | F306 | G313 | T334 | S345 | G356 | F359 | L361 | D362 | N368 | L394 | L408 |
| 28 | H225 | N232 | S239 | A251 | K265 | R267 | N268 | L302 | L308 | G315 | T336 | S347 | G358 | F361 | L363 | D364 | D370 | L396 | L410 |
| 29 | H162 | N169 | S176 | A188 | T202 | K204 | G205 | L239 | — | E250 | H268 | C279 | G290 | F293 | L295 | N296 | N302 | L328 | L341 |
| 30 | H225 | N232 | S239 | A251 | K265 | R267 | N268 | L302 | F308 | G315 | T336 | S347 | G358 | V361 | L363 | D364 | D370 | L396 | L410 |
| 31 | H225 | N232 | S239 | A251 | K265 | R267 | N268 | L302 | F308 | G315 | T336 | S347 | G358 | V361 | L363 | D364 | D370 | L396 | L410 |
| 32 | H198 | N205 | S212 | D224 | K238 | R240 | — | L274 | H280 | D287 | F308 | G319 | G330 | F333 | L335 | D336 | T342 | L368 | L381 |
| 33 | A236 | K243 | S250 | R262 | P275 | P277 | K278 | G312 | N318 | Y325 | N335 | Y346 | — | N357 | A359 | A360 | Y367 | L399 | L409 |
| 34 | H192 | N199 | S206 | A218 | K232 | K234 | R235 | L269 | Y275 | E282 | S300 | C311 | R322 | F325 | L327 | D328 | S334 | L360 | L373 |
| 35 | H279 | N286 | S293 | A305 | — | — | — | L331 | — | E342 | H360 | C371 | G382 | F385 | L387 | N388 | K394 | L420 | L433 |
| 36 | H229 | D236 | S243 | A255 | K269 | R271 | N272 | L306 | C312 | D319 | L340 | S351 | G362 | F365 | L367 | D368 | D374 | L400 | L414 |
| 37 | H189 | N196 | S203 | T215 | K229 | R231 | N232 | L266 | C272 | G279 | S300 | S311 | G322 | F325 | L327 | D328 | D334 | L360 | L374 |
| 38 | H196 | D203 | S210 | R222 | Q236 | K237 | R238 | L272 | L278 | N285 | S306 | — | — | — | — | — | T315 | L341 | L354 |
| 39 | L188 | N195 | S202 | P214 | N228 | K230 | R231 | L265 | C271 | D278 | S296 | C307 | G318 | F321 | L323 | N324 | D330 | L356 | L369 |
| 40 | H200 | N207 | S214 | T226 | K240 | R242 | N243 | L277 | C283 | G290 | S311 | S322 | G333 | F336 | L338 | D339 | D345 | L371 | L385 |
| 41 | H200 | N207 | S214 | T226 | K240 | R242 | D243 | L277 | C283 | G290 | S311 | S322 | G333 | F336 | L338 | D339 | D345 | L371 | L385 |
| 42 | H189 | N196 | S203 | A215 | T229 | K231 | G232 | L266 | — | E277 | H295 | C306 | G317 | F320 | L322 | N323 | K329 | L355 | L368 |
| 43 | H185 | S192 | S199 | K211 | T233 | P235 | R236 | T270 | Q276 | Q283 | T303 | D314 | G325 | Y328 | L330 | D331 | I337 | L363 | L377 |
| 44 | H185 | S192 | S199 | K211 | T233 | P235 | R236 | T270 | Q276 | Q283 | T303 | D314 | G325 | Y328 | L330 | D331 | I337 | L363 | L377 |
| 45 | H220 | N227 | — | — | — | — | — | — | — | — | — | — | — | — | — | — | — | — | — |
| 46 | H219 | N226 | — | — | — | — | — | — | — | — | — | — | — | — | — | — | — | — | — |
| 47 | H77 | N84 | S91 | A103 | K117 | R119 | N120 | L154 | F160 | G167 | T188 | S199 | G210 | V213 | L215 | D216 | D222 | L248 | L262 |
| 48 | H106 | N113 | S120 | A132 | K146 | R148 | S149 | L183 | C189 | D196 | S217 | S228 | G239 | F242 | L244 | D245 | D251 | L277 | L291 |
| 49 | H178 | N185 | S192 | A204 | N218 | R220 | R221 | L255 | N261 | D268 | G287 | S298 | — | — | — | — | — | — | — |
| 50 | — | — | — | S3 | K17 | K19 | H20 | L54 | D60 | S67 | S88 | R99 | G110 | Y113 | L115 | D116 | M122 | L148 | L161 |
| 51 | Y172 | E179 | S186 | — | — | A203 | P204 | L238 | — | P247 | F262 | H273 | P282 | D285 | — | R286 | E293 | L319 | L330 |
| 52 | H171 | A178 | S185 | — | — | D204 | T205 | H238 | — | W247 | S262 | H273 | T282 | D285 | — | L286 | T293 | L319 | L330 |
| 53 | H171 | A178 | S185 | — | — | D204 | T205 | H238 | — | W247 | S262 | H273 | T282 | D285 | — | L286 | I293 | L319 | L330 |
| 54 | — | — | — | — | — | — | — | — | — | — | — | S6 | G17 | V20 | L22 | D23 | D29 | L55 | L69 |
| 55 | Y172 | E179 | S186 | — | — | A203 | P204 | L238 | — | P247 | F262 | H273 | P282 | D285 | — | R286 | E293 | L319 | L330 |
| 56 | A170 | N177 | S184 | R196 | — | K204 | D205 | R238 | — | — | F261 | Y272 | S280 | K283 | R285 | A286 | L293 | L319 | L329 |
| 57 | Q188 | E195 | S202 | R214 | — | E219 | P220 | D254 | — | K261 | S276 | P287 | T296 | E299 | P301 | L302 | E309 | L335 | L345 |
| 58 | H176 | A183 | S190 | R202 | — | K210 | D211 | E244 | — | — | S263 | H274 | D283 | D286 | D288 | M289 | I296 | L322 | L332 |
| 59 | S173 | A180 | G187 | R199 | — | K207 | Q208 | I241 | — | — | V264 | Y275 | K283 | K286 | F288 | K289 | Y296 | L322 | L332 |
| 60 | H173 | N180 | S187 | — | G203 | F205 | F206 | I239 | S243 | — | — | P273 | M283 | A286 | L288 | A289 | Q295 | L321 | L331 |
| 61 | H173 | E180 | S187 | G199 | — | A207 | T208 | T241 | — | T250 | — | H272 | P281 | D284 | — | T285 | P292 | L318 | L329 |
| 62 | — | — | — | — | — | — | — | — | — | — | — | — | — | — | — | — | — | — | — |
| 63 | S173 | R180 | G187 | R199 | — | K207 | Q208 | L241 | — | Q250 | T265 | Y276 | E284 | Q287 | L289 | A290 | Y297 | L323 | L333 |
| 64 | A180 | A187 | S194 | A206 | — | — | A217 | D250 | I256 | G263 | H275 | H286 | — | G297 | L299 | A300 | E307 | L333 | L343 |
| 65 | H186 | R193 | S200 | T212 | T222 | K224 | E225 | T259 | T265 | G272 | — | H292 | A303 | K306 | F308 | K309 | K316 | L342 | L352 |
| 66 | H173 | Q180 | S187 | Q199 | H207 | L209 | Q210 | G244 | R250 | — | S270 | H281 | E290 | L293 | S295 | L296 | D303 | L329 | L339 |
| 67 | F171 | A178 | G185 | R197 | — | K205 | I206 | L239 | — | — | R262 | Y273 | R281 | P284 | A286 | A287 | V294 | L320 | L330 |
| 68 | Y173 | A180 | G187 | — | G204 | K206 | A207 | E240 | Q244 | — | — | H270 | — | E278 | P280 | I281 | D287 | L313 | L323 |
| 69 | A174 | E181 | S188 | K200 | G212 | K214 | M215 | T249 | — | G257 | E272 | Y283 | — | P294 | A296 | A297 | R304 | L330 | L340 |
| 70 | Y171 | E178 | S185 | R197 | P209 | P211 | P212 | V246 | V252 | A257 | R283 | E294 | A303 | E306 | P308 | L309 | E316 | L342 | L352 |
| 71 | — | — | — | — | — | — | — | T184 | C190 | L197 | — | S213 | — | — | — | — | — | — | L230 |
| 72 | Y190 | E197 | S204 | R216 | P228 | P230 | P231 | V265 | V271 | A276 | R299 | E310 | A319 | E322 | P324 | L325 | E332 | L358 | L368 |
| 73 | A176 | E183 | S190 | K202 | — | K209 | M210 | V244 | — | W252 | 1267 | F278 | — | Q289 | A291 | A292 | P299 | L325 | L335 |
| 74 | A177 | R184 | G191 | R203 | G209 | S211 | P212 | V243 | — | G252 | T267 | P278 | — | D289 | P291 | S292 | P299 | L325 | L335 |
| 75 | A177 | R184 | G191 | R203 | G209 | S211 | P212 | V243 | — | G252 | T267 | P278 | — | D289 | P291 | S292 | P299 | L325 | L335 |
| 76 | Y175 | D182 | S189 | — | E203 | 1205 | S206 | K239 | K244 | — | V264 | H275 | I285 | S288 | L290 | L291 | Y298 | L324 | L334 |
| 77 | A177 | E184 | S191 | K203 | — | K210 | M211 | V245 | — | Y253 | T268 | Y279 | — | P290 | A292 | A293 | P300 | L326 | L336 |
| 78 | A171 | Y178 | G185 | A197 | P206 | G208 | P209 | I241 | — | G250 | T265 | Y276 | — | L287 | L289 | S290 | E297 | L323 | L333 |
| 79 | A175 | H182 | G189 | K201 | T205 | G207 | P208 | V240 | — | K249 | S264 | Y275 | — | E286 | L288 | A289 | E296 | L322 | L332 |
| 80 | S186 | A193 | G200 | K212 | P224 | T226 | R227 | R261 | H267 | F274 | E284 | H295 | — | S306 | I308 | A309 | P316 | L342 | L352 |
| 81 | A177 | R184 | G191 | R203 | G209 | A211 | P212 | V243 | — | G252 | T267 | P278 | — | E289 | P291 | S292 | P299 | L325 | L335 |
| 82 | H174 | G181 | S188 | — | G204 | A206 | Y207 | V240 | R244 | — | F263 | H274 | E283 | A286 | P288 | L289 | E296 | L322 | L332 |
| 83 | Y175 | D182 | S189 | — | E203 | I205 | S206 | K239 | K244 | — | V264 | H275 | I285 | S288 | L290 | L291 | Y298 | L324 | L334 |
| 84 | A187 | G194 | S201 | — | P223 | P225 | K226 | Q260 | G265 | F272 | A282 | Y293 | — | P304 | A306 | S307 | L314 | L340 | L350 |
| 85 | K171 | A178 | S185 | A197 | — | — | G198 | L232 | G238 | S245 | S253 | F264 | — | P275 | A277 | A278 | H285 | L311 | A321 |
| 86 | K169 | E176 | S183 | G195 | — | — | V196 | F229 | G235 | A242 | E251 | H262 | — | P273 | M275 | S276 | N283 | L309 | S319 |
| 87 | D182 | Q189 | S196 | Q207 | P213 | F215 | A216 | V247 | — | G256 | R271 | A282 | — | P293 | I295 | P296 | P303 | L329 | L339 |
| 88 | L174 | N181 | S188 | P200 | — | R207 | A208 | L242 | G248 | K250 | I261 | Y272 | — | K283 | Q285 | L286 | Y293 | L318 | L328 |
| 89 | K168 | E175 | S182 | T194 | — | — | Q195 | E227 | G233 | — | K245 | Y256 | — | P267 | S269 | A270 | N277 | L303 | A313 |
| 90 | S178 | E185 | S192 | K204 | A217 | G219 | P220 | V253 | — | — | D274 | H285 | — | A296 | M298 | A299 | P306 | L332 | L342 |
| 91 | A179 | G186 | S193 | R205 | P226 | P228 | K229 | H263 | E268 | F275 | A294 | Y305 | — | P316 | A318 | S319 | P326 | L352 | L362 |
| 92 | S178 | Q185 | G192 | R204 | P216 | V218 | R219 | E253 | N259 | F266 | E276 | Y287 | — | P298 | A300 | S301 | P308 | L334 | L344 |
| 93 | A197 | D204 | S211 | T223 | T229 | A231 | R232 | V266 | — | G275 | H290 | P301 | — | P312 | L314 | S315 | E322 | V348 | F358 |
| 94 | S180 | E187 | G194 | K206 | A219 | G221 | P222 | V255 | — | — | D276 | Y287 | — | G298 | M300 | S301 | P308 | L334 | L344 |
| 95 | A172 | A179 | S186 | A194 | — | — | — | E236 | — | S244 | Q255 | G266 | — | A277 | L279 | A280 | P287 | L313 | L323 |
| 96 | L173 | D180 | S187 | P199 | — | R206 | A207 | L241 | G247 | K249 | 1260 | Y271 | — | K282 | Q284 | L285 | Y292 | L317 | L327 |
| 97 | A170 | R177 | G184 | A196 | P206 | G208 | P209 | V241 | — | K250 | E265 | Y276 | — | R287 | L289 | S290 | E297 | L323 | L333 |
| 98 | A229 | K236 | S243 | A254 | K269 | P270 | K271 | S304 | — | G312 | — | — | L348 | S351 | A353 | E354 | Y360 | L386 | L402 |
| 99 | H205 | N212 | S219 | A231 | K246 | K247 | G248 | L282 | T288 | E293 | H311 | C322 | G333 | F336 | L338 | N339 | K345 | L371 | L384 |
| 100 | A232 | K239 | S246 | E257 | K272 | P273 | K274 | S307 | — | G315 | — | — | L351 | A354 | A356 | D357 | Y363 | L389 | L405 |
| 101 | H190 | D197 | S204 | A216 | R230 | K231 | A232 | L266 | H272 | E279 | S297 | C308 | G319 | F322 | L324 | N325 | S331 | L357 | L370 |
| 102 | A228 | K235 | S242 | A253 | T268 | P269 | K270 | V303 | — | R311 | — | — | L347 | E350 | A352 | D353 | Y359 | L385 | L401 |
| 103 | Y189 | D196 | S203 | S215 | S226 | K227 | R228 | L262 | C268 | G274 | P292 | G303 | G314 | F317 | L319 | N320 | S326 | L352 | L365 |
| 104 | A258 | V265 | N272 | E283 | K298 | P299 | K300 | A333 | — | G341 | — | — | F377 | A380 | A382 | D383 | H389 | L415 | L431 |
| 105 | A224 | R231 | S238 | D249 | T264 | P265 | K266 | T299 | — | Q307 | — | — | L343 | D346 | A348 | D349 | Y355 | L381 | L397 |
| 106 | H192 | N199 | S206 | A218 | G233 | R234 | N235 | L269 | C275 | N282 | P303 | S314 | G325 | F328 | L330 | D331 | D337 | L363 | L377 |
| 107 | A232 | K239 | S246 | R258 | K272 | P273 | K274 | S307 | G313 | T320 | S334 | S345 | A356 | L359 | Q361 | F362 | A368 | L395 | L405 |
| 108 | A253 | K260 | S267 | R279 | K293 | P294 | K295 | S328 | L334 | T341 | S355 | S366 | A377 | L380 | K382 | F383 | A389 | L416 | L426 |
| 109 | A223 | R230 | S237 | K249 | A263 | P264 | K265 | T298 | D304 | G311 | S325 | S336 | A347 | L350 | K352 | F353 | A359 | L386 | L396 |
| 110 | H237 | N244 | S251 | A263 | G278 | R279 | N280 | L314 | C320 | D327 | S348 | S359 | G370 | F373 | L375 | D376 | D382 | L408 | L422 |
| 111 | A224 | R231 | S238 | K250 | A264 | P265 | K266 | T299 | D305 | G312 | S326 | S337 | A348 | L351 | K353 | F354 | A360 | L387 | L397 |
| 112 | L185 | N192 | S199 | P211 | K226 | K227 | R228 | L262 | C268 | D275 | S293 | C304 | G315 | F318 | L320 | N321 | D327 | L353 | L366 |
| 113 | A239 | R246 | S253 | K265 | A279 | P280 | K281 | T314 | D320 | G327 | S341 | S352 | A363 | L366 | K368 | F369 | A375 | L402 | L412 |
| 114 | A232 | K239 | S246 | R258 | K272 | P273 | K274 | S307 | G313 | T320 | S334 | S345 | A356 | L359 | Q361 | F362 | A368 | L395 | L405 |
| 115 | H190 | D197 | S204 | A216 | R230 | K231 | A232 | L266 | H272 | E279 | S297 | C308 | G319 | F322 | L324 | N325 | S331 | L357 | L370 |
| 116 | A253 | K260 | S267 | R279 | K293 | P294 | K295 | S328 | L334 | T341 | S355 | S366 | A377 | L380 | K382 | F383 | A389 | L416 | L426 |
| 117 | H192 | N199 | S206 | A218 | K233 | K234 | G235 | L269 | A275 | E280 | H298 | C309 | G020 | F323 | L325 | N326 | K332 | L358 | L371 |
| | | Pos | Pos | Pos | Pos | Pos | Pos | Pos | Pos | Pos | Pos | Pos | Pos | Pos | Pos | Pos | Pos | Pos | Pos |
| | ID | 39 | 40 | 41 | 42 | 43 | 44 | 45 | 46 | 47 | 48 | 49 | 50 | 51 | 52 | 53 | 54 | 55 | 56 |
| | 1 | F417 | T418 | T419 | F420 | A432 | T434 | K438 | L449 | T451 | F462 | Y470 | S476 | V477 | D482 | Y493 | K498 | E515 | K528 |
| | 2 | F417 | T418 | T419 | F420 | A432 | T434 | K438 | L449 | T451 | F462 | Y470 | S476 | V477 | D482 | Y493 | K498 | E515 | K528 |
| | 3 | F416 | T417 | T418 | F419 | A431 | T433 | K437 | L448 | T450 | F461 | Y469 | C475 | V476 | D481 | Y492 | K497 | E514 | K527 |
| | 4 | F416 | T417 | T418 | F419 | A431 | T433 | K437 | L448 | T450 | F461 | Y469 | S475 | V476 | D481 | Y492 | K497 | E514 | K527 |
| | 5 | F418 | T419 | T420 | F421 | A433 | T435 | K439 | L450 | T452 | F463 | Y471 | S477 | V478 | D483 | Y494 | K499 | E516 | K529 |
| | 6 | F388 | T389 | T390 | F391 | A403 | T405 | K409 | L420 | T422 | F433 | Y441 | S447 | V448 | D453 | Y464 | K469 | E486 | K499 |
| | 7 | Y417 | T418 | T419 | F420 | A432 | T434 | K438 | L449 | T451 | Y462 | Y470 | S476 | V477 | E482 | Y493 | K498 | E515 | K525 |
| | 8 | Y393 | T394 | T395 | F396 | A408 | T410 | K414 | L425 | A427 | Y438 | F446 | S452 | V453 | D458 | Y469 | K474 | D491 | K504 |
| | 9 | Y392 | T393 | T394 | F395 | A407 | T409 | K413 | L424 | A426 | Y437 | Y445 | A451 | V452 | D457 | Y468 | K473 | D490 | K503 |
| | 10 | Y390 | T391 | T392 | F393 | A405 | T407 | K411 | L422 | V424 | Y435 | Y443 | S449 | V450 | E455 | Y466 | K471 | D488 | K500 |
| | 11 | Y387 | T388 | T389 | F390 | A402 | T404 | R408 | L419 | A421 | Y432 | Y440 | S446 | V447 | D452 | F463 | K468 | D485 | T498 |
| | 12 | Y386 | T387 | T388 | F389 | A401 | T403 | K407 | L418 | A420 | Y431 | Y439 | S445 | V446 | E451 | Y462 | R467 | E484 | K497 |
| | 13 | Y387 | T388 | T389 | F390 | A402 | T404 | T408 | L419 | A421 | F432 | Y440 | S446 | V447 | D452 | Y463 | R468 | D485 | S498 |
| | 14 | Y388 | T389 | T390 | F391 | A403 | K405 | K409 | L420 | A422 | Y433 | Y441 | S447 | V448 | E453 | Y464 | R469 | D486 | K499 |
| | 15 | Y390 | T391 | T392 | F393 | A405 | T407 | K411 | L422 | V424 | F435 | Y443 | S449 | V450 | E455 | Y466 | K471 | E488 | K501 |
| | 16 | Y390 | T391 | T392 | F393 | A405 | T407 | K411 | L422 | V424 | F435 | Y443 | S449 | V450 | E455 | Y466 | K471 | E488 | K501 |
| | 17 | Y387 | T388 | T389 | F390 | A402 | T404 | K408 | L419 | A421 | Y432 | Y440 | L446 | V447 | D452 | Y463 | R468 | D485 | T498 |
| | 18 | Y388 | T389 | T390 | F391 | S403 | T405 | K409 | L420 | V422 | Y433 | Y441 | S447 | V448 | E453 | Y464 | R469 | D486 | S499 |
| | 19 | Y383 | T384 | T385 | F386 | S398 | T400 | K404 | L415 | V417 | Y428 | Y436 | S442 | V443 | E448 | Y459 | R464 | D481 | S494 |
| | 20 | Y389 | T390 | T391 | F392 | A404 | R406 | K410 | L421 | A423 | Y434 | Y442 | S448 | V449 | D454 | Y465 | R470 | D487 | S500 |
| | 21 | Y386 | T387 | T388 | F389 | A401 | R403 | K407 | L418 | A420 | C431 | Y439 | S445 | V446 | D451 | Y462 | K467 | D484 | T497 |
| | 22 | Y391 | T392 | T393 | F394 | A406 | T408 | K412 | L423 | V425 | Y436 | Y444 | S450 | V451 | D456 | Y467 | R472 | D489 | K502 |
| | 23 | Y395 | T396 | T397 | F398 | A410 | T412 | K416 | L427 | V429 | Y440 | Y448 | S454 | V455 | D460 | Y471 | R476 | D493 | K506 |
| | 24 | Y384 | T385 | T386 | F387 | A399 | T401 | K405 | L416 | V418 | Y429 | Y437 | S443 | V444 | D449 | Y460 | R465 | D482 | K495 |
| | 25 | Y430 | T431 | T432 | F433 | A445 | T447 | K451 | L462 | V464 | Y475 | Y483 | S489 | V490 | D495 | Y506 | R511 | D528 | K541 |
| | 26 | Y356 | T357 | T358 | F359 | A371 | R373 | K377 | L388 | T390 | Y401 | Y409 | S415 | V416 | E421 | Y432 | K437 | E454 | K467 |
| | 27 | Y428 | T429 | T430 | F431 | A443 | T445 | K449 | L460 | V462 | Y473 | Y481 | S487 | V488 | E493 | Y504 | K509 | E526 | N539 |
| | 28 | Y430 | T431 | T432 | F433 | A445 | T447 | K451 | L462 | V464 | Y475 | Y483 | S489 | V490 | E495 | Y506 | K511 | D528 | N541 |
| | 29 | Y361 | T362 | T363 | F364 | A376 | T378 | K382 | L393 | V395 | Y406 | Y414 | S420 | V421 | D426 | Y437 | R442 | D459 | K472 |
| | 30 | Y430 | T431 | T432 | F433 | A445 | T447 | K451 | L462 | V464 | Y475 | Y483 | S489 | V490 | E495 | Y506 | K511 | D528 | N541 |
| | 31 | Y430 | T431 | T432 | F433 | A445 | T447 | K451 | L462 | V464 | Y475 | Y483 | S489 | V490 | E495 | Y506 | K511 | D528 | N541 |
| | 32 | Y401 | T402 | T403 | F404 | A416 | L418 | K422 | L433 | V435 | Y446 | Y454 | L460 | V461 | D466 | Y477 | R482 | D499 | — |
| | 33 | L429 | L430 | N431 | Y432 | K444 | E446 | V450 | L461 | K463 | V476 | F484 | D490 | L491 | T496 | L509 | V514 | A531 | F544 |
| | 34 | Y393 | T394 | T395 | F396 | — | — | — | L402 | C404 | Y408 | Y416 | L422 | V423 | E428 | Y439 | R444 | D461 | K474 |
| | 35 | Y453 | T454 | T455 | F456 | A468 | T470 | K474 | L485 | V487 | Y498 | Y506 | S512 | V513 | D518 | Y529 | R534 | D551 | K564 |
| | 36 | F434 | T435 | T436 | F437 | A449 | T451 | K455 | L466 | V468 | H479 | Y487 | L493 | A494 | G499 | Y510 | K515 | D532 | A543 |
| | 37 | Y394 | T395 | S396 | F397 | A409 | T411 | K415 | L426 | V428 | H439 | Y447 | L453 | V454 | A459 | Y470 | K475 | D492 | D505 |
| | 38 | F374 | T375 | T376 | F377 | S389 | L391 | Q395 | L406 | V408 | Y419 | Y427 | S433 | V434 | D439 | F450 | R455 | D472 | T485 |
| | 39 | Y389 | T390 | T391 | F392 | A404 | — | — | — | — | — | — | — | — | — | — | — | — | — |
| | 40 | Y405 | T406 | S407 | F408 | A420 | T422 | K426 | L437 | V439 | H450 | Y458 | L464 | V465 | A470 | Y481 | — | K493 | — |
| | 41 | Y405 | T406 | S407 | F408 | A420 | T422 | K426 | L437 | V439 | H450 | Y458 | L464 | V465 | A470 | Y481 | — | K493 | — |
| | 42 | Y388 | T389 | T390 | F391 | A403 | T405 | — | — | — | — | — | — | — | — | — | — | — | — |
| | 43 | F397 | T398 | T399 | F400 | R412 | K414 | L418 | I429 | V431 | Y442 | Y450 | N456 | V457 | Q462 | Y473 | R478 | E495 | K508 |
| | 44 | F397 | T398 | T399 | F400 | R412 | K414 | L418 | I429 | V431 | Y442 | Y450 | N456 | V457 | Q462 | Y473 | R478 | E495 | K508 |
| | 45 | — | — | — | — | — | — | — | — | — | — | — | — | — | — | — | — | — | — |
| | 46 | — | — | — | — | — | — | — | — | — | — | — | — | — | — | — | — | — | — |
| | 47 | Y282 | T283 | T284 | F285 | A297 | T299 | K303 | L314 | V316 | Y327 | Y335 | S341 | V342 | E347 | Y358 | K363 | D380 | N393 |
| | 48 | F311 | T312 | T313 | F314 | A326 | T328 | K332 | L343 | V345 | H356 | Y364 | S370 | A371 | G376 | — | K383 | D400 | V413 |
| | 49 | — | — | — | — | — | — | — | — | — | — | — | — | — | — | — | — | — | — |
| | 50 | Y181 | T182 | T183 | F184 | A196 | L198 | R202 | L213 | V215 | Y226 | Y234 | M240 | V241 | E246 | Y257 | S262 | — | — |
| | 51 | L350 | T351 | T352 | F353 | L365 | E367 | E371 | L382 | I384 | R395 | Y403 | A409 | V410 | H415 | L426 | M431 | R448 | G461 |
| | 52 | L350 | T351 | T352 | F353 | S365 | A367 | Q371 | L382 | V384 | H395 | Y403 | T409 | V410 | D415 | F426 | R431 | — | A458 |
| | 53 | L350 | T351 | T352 | F353 | S365 | A367 | Q371 | L382 | V384 | H395 | Y403 | T409 | V410 | D415 | F426 | R431 | — | T458 |
| | 54 | Y89 | T90 | T91 | F92 | A104 | T106 | K110 | L121 | V123 | Y134 | Y142 | S148 | V149 | E154 | Y165 | K170 | D187 | N200 |
| | 55 | L350 | T351 | T352 | F353 | L365 | E367 | E371 | L382 | I384 | R395 | Y403 | A409 | V410 | H415 | L426 | M431 | R448 | G461 |
| | 56 | F349 | T350 | T351 | F352 | K364 | D366 | K370 | V381 | L383 | R394 | Y402 | K408 | I409 | D414 | F425 | R430 | E447 | — |
| | 57 | L365 | T366 | V367 | M368 | L380 | A382 | L386 | L397 | V399 | F410 | Y418 | H424 | F425 | A430 | M441 | R446 | E463 | — |
| | 58 | L352 | S353 | T354 | Y355 | L367 | D369 | D373 | L384 | V386 | V397 | Y405 | K411 | I412 | N417 | F428 | R433 | Q450 | — |
| | 59 | F352 | T353 | L354 | F355 | E367 | R369 | L373 | M384 | I386 | F397 | Y405 | E411 | H412 | D417 | 1428 | R433 | N450 | — |
| | 60 | L351 | T352 | N353 | Y354 | L366 | R368 | R372 | L383 | V385 | V396 | Y404 | E410 | Y411 | D416 | L427 | R432 | A449 | — |
| | 61 | L349 | T350 | T351 | F352 | A364 | D366 | R370 | L381 | V383 | A394 | Y402 | A408 | A409 | E414 | F425 | R430 | R447 | V460 |
| | 62 | — | — | — | — | — | — | — | — | — | — | — | — | — | — | — | — | — | — |
| | 63 | F353 | T354 | L355 | F356 | M368 | K370 | 1374 | M385 | 1387 | L398 | Y406 | E412 | H413 | E418 | L429 | R434 | K451 | — |
| | 64 | L363 | S364 | A365 | F366 | G378 | D380 | L384 | L395 | 1397 | R408 | Y416 | E422 | L423 | S428 | L439 | R444 | E461 | — |
| | 65 | L373 | T374 | V375 | Y376 | R388 | A390 | V394 | L405 | V407 | T418 | Y426 | E432 | S433 | A438 | F449 | R454 | E471 | — |
| | 66 | 1359 | N360 | V361 | M362 | L374 | E376 | R380 | L391 | V393 | H404 | L412 | I418 | V419 | I424 | L435 | R440 | E457 | — |
| | 67 | L350 | T351 | T352 | F353 | R365 | N367 | I371 | L382 | L384 | R395 | Y403 | E409 | I410 | D415 | F426 | R431 | E448 | — |
| | 68 | L343 | T344 | V345 | F346 | P358 | T360 | L364 | L375 | I377 | H388 | Y396 | K402 | V403 | T408 | L419 | R424 | N441 | — |
| | 69 | 1360 | I361 | N362 | L363 | Q375 | D377 | I381 | 1392 | A394 | R405 | Y413 | E419 | A420 | E425 | F436 | R441 | E458 | A471 |
| | 70 | L372 | T373 | V374 | L375 | M387 | L389 | M393 | L404 | V406 | V417 | Y425 | R431 | F432 | E437 | V448 | R453 | R470 | — |
| | 71 | — | — | — | — | — | — | — | — | — | — | — | — | — | — | — | — | — | — |
| | 72 | L388 | T389 | V390 | L391 | M403 | L405 | M409 | L420 | V422 | V433 | Y441 | R447 | F448 | E453 | V464 | R469 | R486 | — |
| | 73 | T355 | T356 | T357 | L358 | R370 | D372 | I376 | L387 | I389 | R400 | Y408 | E414 | R415 | V420 | F431 | R436 | E453 | A466 |
| | 74 | L355 | T356 | V357 | F358 | A370 | D372 | E376 | L387 | V389 | R400 | L408 | E414 | T415 | R420 | L429 | L434 | E451 | — |
| | 75 | L355 | T356 | V357 | F358 | A370 | D372 | E376 | L387 | V389 | R400 | L408 | E414 | T415 | R420 | L429 | L434 | E451 | — |
| | 76 | L354 | T355 | T356 | Y357 | L369 | Q371 | L375 | L386 | I388 | L399 | P407 | D413 | R414 | S419 | I430 | I435 | — | — |
| | 77 | T356 | I357 | T358 | L359 | Q371 | E373 | I377 | L388 | I390 | R401 | Y409 | E415 | R416 | E421 | L432 | R437 | E454 | A467 |
| | 78 | I353 | R354 | V355 | M356 | L368 | D370 | V374 | M385 | I387 | K398 | Y406 | E412 | R413 | F418 | L429 | Y434 | R451 | — |
| | 79 | I352 | R353 | A354 | M355 | A367 | E369 | A373 | M384 | I386 | K397 | Y405 | E411 | K412 | F417 | L428 | Y433 | E450 | — |
| | 80 | L372 | S373 | N374 | Y375 | M387 | D389 | V393 | L404 | A406 | L418 | Y426 | N432 | R433 | D438 | L449 | I454 | S471 | N484 |
| | 81 | L355 | T356 | V357 | F358 | T370 | D372 | E376 | L387 | V389 | R400 | F408 | E414 | T415 | R420 | L429 | L434 | E451 | — |
| | 82 | L352 | T353 | V354 | M355 | L367 | Q369 | L373 | L384 | L386 | S397 | Y405 | P411 | W412 | K417 | F428 | V433 | E450 | — |
| | 83 | L354 | T355 | T356 | F357 | L369 | Q371 | L375 | L386 | I388 | L399 | P407 | D413 | R414 | S419 | I430 | I435 | — | — |
| | 84 | F370 | L371 | S372 | F373 | L394 | P396 | A400 | L411 | T413 | L425 | Y433 | Q439 | R440 | Q445 | V457 | L462 | Q479 | — |
| | 85 | F341 | T342 | T343 | F344 | Q356 | E358 | K362 | — | D374 | L387 | Y395 | — | R398 | H403 | S416 | R421 | D438 | — |
| | 86 | I339 | T340 | S341 | Y342 | L354 | E356 | L360 | — | Q372 | L385 | F393 | — | Y396 | H401 | I414 | Y419 | A436 | — |
| | 87 | L359 | T360 | V361 | F362 | A374 | D376 | L380 | L391 | V393 | R404 | S412 | E418 | R419 | E424 | L433 | L438 | E455 | — |
| | 88 | Y348 | A349 | F350 | F351 | K363 | D365 | R369 | L380 | Y382 | R395 | Y403 | S409 | R410 | D415 | I426 | K431 | E448 | — |
| | 89 | I333 | T334 | S335 | F336 | L348 | D350 | K354 | — | K366 | R378 | Y386 | — | D389 | H394 | V407 | E412 | E429 | — |
| | 90 | L362 | R363 | S364 | M365 | L377 | D379 | M383 | M394 | I396 | R407 | Y415 | K421 | R422 | Q427 | L438 | Y443 | D460 | — |
| | 91 | L382 | I383 | S384 | F385 | L406 | P408 | A412 | L423 | T425 | L437 | Y445 | Q451 | R452 | Q457 | V469 | L474 | Q491 | — |
| | 92 | L364 | T365 | N366 | F367 | L379 | N381 | V385 | L396 | K398 | L410 | Y418 | L424 | R425 | N430 | L441 | T446 | P463 | — |
| | 93 | L378 | R379 | T380 | F381 | H393 | D395 | N399 | L410 | V412 | R423 | Y431 | Q437 | L438 | E443 | L454 | Y459 | E476 | — |
| | 94 | L364 | R365 | S366 | M367 | L379 | D381 | V385 | M396 | I398 | R409 | Y417 | R423 | R424 | E429 | L440 | Y445 | D462 | — |
| | 95 | L343 | T344 | A345 | F346 | R357 | D359 | L363 | L374 | I376 | T387 | Y395 | D401 | R402 | D407 | F418 | R423 | Q440 | — |
| | 96 | Y347 | A348 | C349 | F350 | K362 | D364 | I368 | L379 | Y381 | R394 | Y402 | A408 | R409 | D414 | 1425 | K430 | E447 | — |
| | 97 | I353 | R354 | V355 | M356 | K368 | E370 | T374 | M385 | I387 | R398 | Y406 | E412 | K413 | F418 | F429 | Y434 | E451 | — |
| | 98 | L422 | L423 | N424 | Y425 | K437 | E439 | V443 | L454 | S458 | V469 | F477 | D483 | L484 | K489 | L502 | V507 | T524 | — |
| | 99 | Y404 | T405 | T406 | F407 | A419 | T421 | K425 | L436 | I438 | Y449 | Y457 | S463 | V464 | D469 | Y480 | R485 | D502 | N515 |
| | 100 | L425 | L426 | N427 | Y428 | K440 | E442 | V446 | L457 | N461 | V472 | F480 | D486 | L487 | K492 | L505 | V510 | A527 | — |
| | 101 | Y390 | T391 | T392 | F393 | A405 | T407 | K411 | L422 | V424 | Y435 | Y443 | S449 | V450 | E455 | Y466 | K471 | D488 | K500 |
| | 102 | L421 | L422 | N423 | Y424 | K436 | E438 | V442 | L453 | K457 | V468 | F476 | D482 | I483 | K488 | L501 | V506 | A523 | — |
| | 103 | Y385 | T386 | T387 | F388 | A400 | R402 | K406 | L417 | A419 | Y430 | Y438 | L444 | V445 | E450 | Y461 | K466 | E483 | K496 |
| | 104 | I451 | L452 | S453 | F454 | K466 | Q468 | A472 | L483 | S487 | V498 | F506 | D512 | L513 | K518 | L531 | V536 | A553 | — |
| | 105 | L417 | L418 | N419 | Y420 | K432 | E434 | V438 | L449 | T453 | V464 | F472 | D478 | R479 | K484 | L497 | V502 | S519 | — |
| | 106 | F397 | T398 | T399 | F400 | A412 | T414 | K418 | L429 | V431 | H442 | Y450 | S456 | A457 | G462 | Y473 | K478 | D495 | D508 |
| | 107 | L425 | L426 | N427 | Y428 | K440 | E442 | V446 | L457 | N461 | V472 | F480 | D486 | L487 | K492 | L505 | V510 | A527 | — |
| | 108 | I446 | L447 | S448 | Y449 | K461 | K463 | A467 | L478 | D482 | V493 | F501 | D507 | L508 | K513 | L526 | V531 | A548 | — |
| | 109 | L416 | L417 | N418 | Y419 | K431 | E433 | V437 | L448 | R452 | V463 | F471 | D477 | R478 | K483 | L496 | V501 | S518 | — |
| | 110 | F442 | T443 | T444 | F445 | A457 | T459 | K463 | L474 | V476 | H487 | Y495 | L501 | A502 | G507 | Y518 | K523 | D540 | G549 |
| | 111 | L417 | L418 | N419 | Y420 | K432 | E434 | V438 | L449 | R453 | V464 | F472 | D478 | R479 | K484 | L497 | V502 | S519 | — |
| | 112 | Y386 | T387 | T388 | F389 | A401 | R403 | K407 | L418 | A420 | C431 | Y439 | S445 | V446 | D451 | Y462 | K467 | D484 | S494 |
| | 113 | L432 | L433 | N434 | Y435 | K447 | E449 | V453 | L464 | R468 | V479 | F487 | D493 | R494 | K499 | L512 | V517 | S534 | — |
| | 114 | L425 | L426 | N427 | Y428 | K440 | E442 | V446 | L457 | N461 | V472 | F480 | D486 | L487 | K492 | L505 | V510 | A527 | — |
| | 115 | Y390 | T391 | T392 | F393 | A405 | T407 | K411 | L422 | V424 | Y435 | Y443 | S449 | V450 | E455 | Y466 | K471 | D488 | S497 |
| | 116 | I446 | L447 | S448 | Y449 | K461 | K463 | A467 | L478 | D482 | V493 | F501 | D507 | L508 | K513 | L526 | V531 | A548 | — |
| | 117 | Y391 | T392 | T393 | F394 | A406 | T408 | K412 | L423 | V425 | Y436 | Y444 | S450 | V451 | D456 | Y467 | R472 | D489 | K502 |

[0556] Assays to test for the functionality of such mutants are readily available in the art, and respectively, described in the Example section of the present invention.

[0557] In a preferred embodiment, the mutated PPO refers to a polypeptide of SEQ ID NO: 1, 2, 3, 4, 5, 6, 7, 8, 9, 10, 11, 12, 13, 14, 15, 16, 17, 18, 19, 20, 21, 22, 23, 24, 25, 26, 27, 28, 29, 30, 31, 32, 33, 34, 35, 36, 37, 38, 39, 40, 41, 42, 43, 44, 45, 46, 47, 48, 49, 50, 51, 52, 53, 54, 55, 56, 57, 58, 59, 60, 61, 62, 63, 64, 65, 66, 67, 68, 69, 70, 71, 72, 73, 74, 75, 76, 77, 78, 79, 80, 81, 82, 83, 84, 85, 86, 87, 88, 89, 90, 91, 92, 93, 94, 95, 96, 97, 98, 99, 100, 101, 102, 103, 104, 105, 106, 107, 108, 109, 110, 111, 112, 113, 114, 115, 116, or 117, in which the amino acid sequence differs at Mutated site 1 (which corresponds to Arg128 of SEQ ID NO: 1) according to Table 2a, and/or at Mutated site 5 (which corresponds to Phe420 of SEQ ID NO: 1) according to Table 2a.

[0558] Examples of differences at these amino acid positions include, but are not limited to, one or more of the following:

[0559] the amino acid at Mutated site 1 is other than Arginine (or Tryosine, or Cysteine; as the case may be according to Table 2a);

[0560] the amino acid at Mutated site 5 is other than Phenylalanine (or Methionine, or Tyrosine, or Leucine, as the case may be according to Table 2a),

[0561] In particularly preferred embodiment, the mutated PPO comprises a sequence of SEQ ID NO: 1, 2, 3, 4, 5, 6, 7, 8, 9, 10, 11, 12, 13, 14, 15, 16, 17, 18, 19, 20, 21, 22, 23, 24, 25, 26, 27, 28, 29, 30, 31, 32, 33, 34, 35, 36, 37, 38, 39, 40, 41, 42, 43, 44, 45, 46, 47, 48, 49, 50, 51, 52, 53, 54, 55, 56, 57, 58, 59, 60, 61, 62, 63, 64, 65, 66, 67, 68, 69, 70, 71, 72, 73, 74, 75, 76, 77, 78, 79, 80, 81, 82, 83, 84, 85, 86, 87, 88, 89, 90, 91, 92, 93, 94, 95, 96, 97, 98, 99, 100, 101, 102, 103, 104, 105, 106, 107, 108, 109, 110, 111, 112, 113, 114, 115, 116, 117, 577, 579, 581, 583, 585, 587, 589, 591, 593, 595, 597, 599, 601, 603, 605, 607, 609, 611, 613, 615, 617, 619, 621, 623, 625, or 627, a variant, derivative, orthologue, paralogue or homologue thereof, in which:

[0562] the amino acid at Mutated site 1 (which corresponds to Arg128 of SEQ ID NO: 1) is Leu, Ala, Val, Ile, Met, Tyr, Gly, Asn, Cys, Phe, Ser, Thr, Gin, or His, and the amino acid at Mutated site 5 (which corresponds to Phe420 of SEQ ID NO: 1) is Ala, Leu, Val, Ile, or Met.

[0563] In another preferred embodiment, the mutated PPO comprises a sequence of SEQ ID NO: 1, 2, 3, 4, 5, 6, 7, 8, 9, 10, 11, 12, 13, 14, 15, 16, 17, 18, 19, 20, 21, 22, 23, 24, 25, 26, 27, 28, 29, 30, 31, 32, 33, 34, 35, 36, 37, 38, 39, 40, 41, 42, 43, 44, 45, 46, 47, 48, 49, 50, 51, 52, 53, 54, 55, 56, 57, 58, 59, 60, 61, 62, 63, 64, 65, 66, 67, 68, 69, 70, 71, 72, 73, 74, 75, 76, 77, 78, 79, 80, 81, 82, 83, 84, 85, 86, 87, 88, 89, 90, 91, 92, 93, 94, 95, 96, 97, 98, 99, 100, 101, 102, 103, 104, 105, 106, 107, 108, 109, 110, 111, 112, 113, 114, 115, 116, 117, 577, 579, 581, 583, 585, 587, 589, 591, 593, 595, 597, 599, 601, 603, 605, 607, 609, 611, 613, 615, 617, 619, 621, 623, 625, or 627, a variant, derivative, orthologue, paralogue or homologue thereof, in which:

[0564] the amino acid at Mutated site 1 is Leu, and the amino acid at Mutated site 5 is Ala.

[0565] In another preferred embodiment, the mutated PPO comprises a sequence of SEQ ID NO: 1, 2, 3, 4, 5, 6, 7, 8, 9, 10, 11, 12, 13, 14, 15, 16, 17, 18, 19, 20, 21, 22, 23, 24, 25, 26, 27, 28, 29, 30, 31, 32, 33, 34, 35, 36, 37, 38, 39, 40, 41, 42, 43, 44, 45, 46, 47, 48, 49, 50, 51, 52, 53, 54, 55, 56, 57, 58, 59, 60, 61, 62, 63, 64, 65, 66, 67, 68, 69, 70, 71, 72, 73, 74, 75, 76, 77, 78, 79, 80, 81, 82, 83, 84, 85, 86, 87, 88, 89, 90, 91, 92, 93, 94, 95, 96, 97, 98, 99, 100, 101, 102, 103, 104, 105, 106, 107, 108, 109, 110, 111, 112, 113, 114, 115, 116, 117, 577, 579, 581, 583, 585, 587, 589, 591, 593, 595, 597, 599, 601, 603, 605, 607, 609, 611, 613, 615, 617, 619, 621, 623, 625, or 627, a variant, derivative, orthologue, paralogue or homologue thereof, in which:

[0566] the amino acid at Mutated site 1 is Leu, and the amino acid at Mutated site 5 is Leu.

[0567] In another preferred embodiment, the mutated PPO comprises a sequence of SEQ ID NO: 1, 2, 3, 4, 5, 6, 7, 8, 9, 10, 11, 12, 13, 14, 15, 16, 17, 18, 19, 20, 21, 22, 23, 24, 25, 26, 27, 28, 29, 30, 31, 32, 33, 34, 35, 36, 37, 38, 39, 40, 41, 42, 43, 44, 45, 46, 47, 48, 49, 50, 51, 52, 53, 54, 55, 56, 57, 58, 59, 60, 61, 62, 63, 64, 65, 66, 67, 68, 69, 70, 71, 72, 73, 74, 75, 76, 77, 78, 79, 80, 81, 82, 83, 84, 85, 86, 87, 88, 89, 90, 91, 92, 93, 94, 95, 96, 97, 98, 99, 100, 101, 102, 103, 104, 105, 106, 107, 108, 109, 110, 111, 112, 113, 114, 115, 116, 117, 577, 579, 581, 583, 585, 587, 589, 591, 593, 595, 597, 599, 601, 603, 605, 607, 609, 611, 613, 615, 617, 619, 621, 623, 625, or 627, a variant, derivative, orthologue, paralogue or homologue thereof, in which:

[0568] the amino acid at Mutated site 1 is Leu, and the amino acid at Mutated site 5 is Val.

[0569] In another preferred embodiment, the mutated PPO comprises a sequence of SEQ ID NO: 1, 2, 3, 4, 5, 6, 7, 8, 9, 10, 11, 12, 13, 14, 15, 16, 17, 18, 19, 20, 21, 22, 23, 24, 25, 26, 27, 28, 29, 30, 31, 32, 33, 34, 35, 36, 37, 38, 39, 40, 41, 42, 43, 44, 45, 46, 47, 48, 49, 50, 51, 52, 53, 54, 55, 56, 57, 58, 59, 60, 61, 62, 63, 64, 65, 66, 67, 68, 69, 70, 71, 72, 73, 74, 75, 76, 77, 78, 79, 80, 81, 82, 83, 84, 85, 86, 87, 88, 89, 90, 91, 92, 93, 94, 95, 96, 97, 98, 99, 100, 101, 102, 103, 104, 105, 106, 107, 108, 109, 110, 111, 112, 113, 114, 115, 116, 117, 577, 579, 581, 583, 585, 587, 589, 591, 593, 595, 597, 599, 601, 603, 605, 607, 609, 611, 613, 615, 617, 619, 621, 623, 625, or 627, a variant, derivative, orthologue, paralogue or homologue thereof, in which:

[0570] the amino acid at Mutated site 1 is Leu, and the amino acid at Mutated site 5 is Ile.

[0571] In another preferred embodiment, the mutated PPO comprises a sequence of SEQ ID NO: 1, 2, 3, 4, 5, 6, 7, 8, 9, 10, 11, 12, 13, 14, 15, 16, 17, 18, 19, 20, 21, 22, 23, 24, 25, 26, 27, 28, 29, 30, 31, 32, 33, 34, 35, 36, 37, 38, 39, 40, 41, 42, 43, 44, 45, 46, 47, 48, 49, 50, 51, 52, 53, 54, 55, 56, 57, 58, 59, 60, 61, 62, 63, 64, 65, 66, 67, 68, 69, 70, 71, 72, 73, 74, 75, 76, 77, 78, 79, 80, 81, 82, 83, 84, 85, 86, 87, 88, 89, 90, 91, 92, 93, 94, 95, 96, 97, 98, 99, 100, 101, 102, 103, 104, 105, 106, 107, 108, 109, 110, 111, 112, 113, 114, 115, 116, 117, 577, 579, 581, 583, 585, 587, 589, 591, 593, 595, 597, 599, 601, 603, 605, 607, 609, 611, 613, 615, 617, 619, 621, 623, 625, or 627, a variant, derivative, orthologue, paralogue or homologue thereof, in which:

[0572] the amino acid at Mutated site 1 is Leu, and the amino acid at Mutated site 5 is Met.

[0573] In another preferred embodiment, the mutated PPO comprises a sequence of SEQ ID NO: 1, 2, 3, 4, 5, 6, 7, 8, 9, 10, 11, 12, 13, 14, 15, 16, 17, 18, 19, 20, 21, 22, 23, 24, 25, 26, 27, 28, 29, 30, 31, 32, 33, 34, 35, 36, 37, 38, 39, 40, 41, 42, 43, 44, 45, 46, 47, 48, 49, 50, 51, 52, 53, 54, 55, 56, 57, 58, 59, 60, 61, 62, 63, 64, 65, 66, 67, 68, 69, 70, 71, 72, 73, 74, 75, 76, 77, 78, 79, 80, 81, 82, 83, 84, 85, 86, 87, 88, 89, 90, 91, 92, 93, 94, 95, 96, 97, 98, 99, 100, 101, 102, 103, 104, 105, 106, 107, 108, 109, 110, 111, 112, 113, 114, 115, 116, 117, 577, 579, 581, 583, 585, 587, 589, 591, 593, 595, 597, 599, 601, 603, 605, 607, 609, 611, 613, 615, 617, 619, 621, 623, 625, or 627, a variant, derivative, orthologue, paralogue or homologue thereof, in which:

[0574] the amino acid at Mutated site 1 is Ala, and the amino acid at Mutated site 5 is Ala.

[0575] In another preferred embodiment, the mutated PPO comprises a sequence of SEQ ID NO: 1, 2, 3, 4, 5, 6, 7, 8, 9, 10, 11, 12, 13, 14, 15, 16, 17, 18, 19, 20, 21, 22, 23, 24, 25, 26, 27, 28, 29, 30, 31, 32, 33, 34, 35, 36, 37, 38, 39, 40, 41, 42, 43, 44, 45, 46, 47, 48, 49, 50, 51, 52, 53, 54, 55, 56, 57, 58, 59, 60, 61, 62, 63, 64, 65, 66, 67, 68, 69, 70, 71, 72, 73, 74, 75, 76, 77, 78, 79, 80, 81, 82, 83, 84, 85, 86, 87, 88, 89, 90, 91, 92, 93, 94, 95, 96, 97, 98, 99, 100, 101, 102, 103, 104, 105, 106, 107, 108, 109, 110, 111, 112, 113, 114, 115, 116, 117, 577, 579, 581, 583, 585, 587, 589, 591, 593, 595, 597, 599, 601, 603, 605, 607, 609, 611, 613, 615, 617, 619, 621, 623, 625, or 627, a variant, derivative, orthologue, paralogue or homologue thereof, in which:

[0576] the amino acid at Mutated site 1 is Ala, and the amino acid at Mutated site 5 is Leu.

[0577] In another preferred embodiment, the mutated PPO comprises a sequence of SEQ ID NO: 1, 2, 3, 4, 5, 6, 7, 8, 9, 10, 11, 12, 13, 14, 15, 16, 17, 18, 19, 20, 21, 22, 23, 24, 25, 26, 27, 28, 29, 30, 31, 32, 33, 34, 35, 36, 37, 38, 39, 40, 41, 42, 43, 44, 45, 46, 47, 48, 49, 50, 51, 52, 53, 54, 55, 56, 57, 58, 59, 60, 61, 62, 63, 64, 65, 66, 67, 68, 69, 70, 71, 72, 73, 74, 75, 76, 77, 78, 79, 80, 81, 82, 83, 84, 85, 86, 87, 88, 89, 90, 91, 92, 93, 94, 95, 96, 97, 98, 99, 100, 101, 102, 103, 104, 105, 106, 107, 108, 109, 110, 111, 112, 113, 114, 115, 116, 117, 577, 579, 581, 583, 585, 587, 589, 591, 593, 595, 597, 599, 601, 603, 605, 607, 609, 611, 613, 615, 617, 619, 621, 623, 625, or 627, a variant, derivative, orthologue, paralogue or homologue thereof, in which:

[0578] the amino acid at Mutated site 1 is Ala, and the amino acid at Mutated site 5 is Val.

[0579] In another preferred embodiment, the mutated PPO comprises a sequence of SEQ ID NO: 1, 2, 3, 4, 5, 6, 7, 8, 9, 10, 11, 12, 13, 14, 15, 16, 17, 18, 19, 20, 21, 22, 23, 24, 25, 26, 27, 28, 29, 30, 31, 32, 33, 34, 35, 36, 37, 38, 39, 40, 41, 42, 43, 44, 45, 46, 47, 48, 49, 50, 51, 52, 53, 54, 55, 56, 57, 58, 59, 60, 61, 62, 63, 64, 65, 66, 67, 68, 69, 70, 71, 72, 73, 74, 75, 76, 77, 78, 79, 80, 81, 82, 83, 84, 85, 86, 87, 88, 89, 90, 91, 92, 93, 94, 95, 96, 97, 98, 99, 100, 101, 102, 103, 104, 105, 106, 107, 108, 109, 110, 111, 112, 113, 114, 115, 116, 117, 577, 579, 581, 583, 585, 587, 589, 591, 593, 595, 597, 599, 601, 603, 605, 607, 609, 611, 613, 615, 617, 619, 621, 623, 625, or 627, a variant, derivative, orthologue, paralogue or homologue thereof, in which:

[0580] the amino acid at Mutated site 1 is Ala, and the amino acid at Mutated site 5 is Ile.

[0581] In another preferred embodiment, the mutated PPO comprises a sequence of SEQ ID NO: 1, 2, 3, 4, 5, 6, 7, 8, 9, 10, 11, 12, 13, 14, 15, 16, 17, 18, 19, 20, 21, 22, 23, 24, 25, 26, 27, 28, 29, 30, 31, 32, 33, 34, 35, 36, 37, 38, 39, 40, 41, 42, 43, 44, 45, 46, 47, 48, 49, 50, 51, 52, 53, 54, 55, 56, 57, 58, 59, 60, 61, 62, 63, 64, 65, 66, 67, 68, 69, 70, 71, 72, 73, 74, 75, 76, 77, 78, 79, 80, 81, 82, 83, 84, 85, 86, 87, 88, 89, 90, 91, 92, 93, 94, 95, 96, 97, 98, 99, 100, 101, 102, 103, 104, 105, 106, 107, 108, 109, 110, 111, 112, 113, 114, 115, 116, 117, 577, 579, 581, 583, 585, 587, 589, 591, 593, 595, 597, 599, 601, 603, 605, 607, 609, 611, 613, 615, 617, 619, 621, 623, 625, or 627, a variant, derivative, orthologue, paralogue or homologue thereof, in which:

[0582] the amino acid at Mutated site 1 is Ala, and the amino acid at Mutated site 5 is Met.

[0583] In another preferred embodiment, the mutated PPO comprises a sequence of SEQ ID NO: 1, 2, 3, 4, 5, 6, 7, 8, 9, 10, 11, 12, 13, 14, 15, 16, 17, 18, 19, 20, 21, 22, 23, 24, 25, 26, 27, 28, 29, 30, 31, 32, 33, 34, 35, 36, 37, 38, 39, 40, 41, 42, 43, 44, 45, 46, 47, 48, 49, 50, 51, 52, 53, 54, 55, 56, 57, 58, 59, 60, 61, 62, 63, 64, 65, 66, 67, 68, 69, 70, 71, 72, 73, 74, 75, 76, 77, 78, 79, 80, 81, 82, 83, 84, 85, 86, 87, 88, 89, 90, 91, 92, 93, 94, 95, 96, 97, 98, 99, 100, 101, 102, 103, 104, 105, 106, 107, 108, 109, 110, 111, 112, 113, 114, 115, 116, 117, 577, 579, 581, 583, 585, 587, 589, 591, 593, 595, 597, 599, 601, 603, 605, 607, 609, 611, 613, 615, 617, 619, 621, 623, 625, or 627, a variant, derivative, orthologue, paralogue or homologue thereof, in which:

[0584] the amino acid at Mutated site 1 is Val, and the amino acid at Mutated site 5 is Ala. In another preferred embodiment, the mutated PPO comprises a sequence of SEQ ID NO: 1, 2, 3, 4, 5, 6, 7, 8, 9, 10, 11, 12, 13, 14, 15, 16, 17, 18, 19, 20, 21, 22, 23, 24, 25, 26, 27, 28, 29, 30, 31, 32, 33, 34, 35, 36, 37, 38, 39, 40, 41, 42, 43, 44, 45, 46, 47, 48, 49, 50, 51, 52, 53, 54, 55, 56, 57, 58, 59, 60, 61, 62, 63, 64, 65, 66, 67, 68, 69, 70, 71, 72, 73, 74, 75, 76, 77, 78, 79, 80, 81, 82, 83, 84, 85, 86, 87, 88, 89, 90, 91, 92, 93, 94, 95, 96, 97, 98, 99, 100, 101, 102, 103, 104, 105, 106, 107, 108, 109, 110, 111, 112, 113, 114, 115, 116, 117, 577, 579, 581, 583, 585, 587, 589, 591, 593, 595, 597, 599, 601, 603, 605, 607, 609, 611, 613, 615, 617, 619, 621, 623, 625, or 627, a variant, derivative, orthologue, paralogue or homologue thereof, in which:

[0585] the amino acid at Mutated site 1 is Val, and the amino acid at Mutated site 5 is Leu.

[0586] In another preferred embodiment, the mutated PPO comprises a sequence of SEQ ID NO: 1, 2, 3, 4, 5, 6, 7, 8, 9, 10, 11, 12, 13, 14, 15, 16, 17, 18, 19, 20, 21, 22, 23, 24, 25, 26, 27, 28, 29, 30, 31, 32, 33, 34, 35, 36, 37, 38, 39, 40, 41, 42, 43, 44, 45, 46, 47, 48, 49, 50, 51, 52, 53, 54, 55, 56, 57, 58, 59, 60, 61, 62, 63, 64, 65, 66, 67, 68, 69, 70, 71, 72, 73, 74, 75, 76, 77, 78, 79, 80, 81, 82, 83, 84, 85, 86, 87, 88, 89, 90, 91, 92, 93, 94, 95, 96, 97, 98, 99, 100, 101, 102, 103, 104, 105, 106, 107, 108, 109, 110, 111, 112, 113, 114, 115, 116, 117, 577, 579, 581, 583, 585, 587, 589, 591, 593, 595, 597, 599, 601, 603, 605, 607, 609, 611, 613, 615, 617, 619, 621, 623, 625, or 627, a variant, derivative, orthologue, paralogue or homologue thereof, in which:

[0587] the amino acid at Mutated site 1 is Val, and the amino acid at Mutated site 5 is Val.

[0588] In another preferred embodiment, the mutated PPO comprises a sequence of SEQ ID NO: 1, 2, 3, 4, 5, 6, 7, 8, 9, 10, 11, 12, 13, 14, 15, 16, 17, 18, 19, 20, 21, 22, 23, 24, 25, 26, 27, 28, 29, 30, 31, 32, 33, 34, 35, 36, 37, 38, 39, 40, 41, 42, 43, 44, 45, 46, 47, 48, 49, 50, 51, 52, 53, 54, 55, 56, 57, 58, 59, 60, 61, 62, 63, 64, 65, 66, 67, 68, 69, 70, 71, 72, 73, 74, 75, 76, 77, 78, 79, 80, 81, 82, 83, 84, 85, 86, 87, 88, 89, 90, 91, 92, 93, 94, 95, 96, 97, 98, 99, 100, 101, 102, 103, 104, 105, 106, 107, 108, 109, 110, 111, 112, 113, 114, 115, 116, 117, 577, 579, 581, 583, 585, 587, 589, 591, 593, 595, 597, 599, 601, 603, 605, 607, 609, 611, 613, 615, 617, 619, 621, 623, 625, or 627, a variant, derivative, orthologue, paralogue or homologue thereof, in which:

[0589] the amino acid at Mutated site 1 is Val, and the amino acid at Mutated site 5 is Ile.

[0590] In another preferred embodiment, the mutated PPO comprises a sequence of SEQ ID NO: 1, 2, 3, 4, 5, 6, 7, 8, 9, 10, 11, 12, 13, 14, 15, 16, 17, 18, 19, 20, 21, 22, 23, 24, 25, 26, 27, 28, 29, 30, 31, 32, 33, 34, 35, 36, 37, 38, 39, 40, 41, 42, 43, 44, 45, 46, 47, 48, 49, 50, 51, 52, 53, 54, 55, 56, 57, 58, 59, 60, 61, 62, 63, 64, 65, 66, 67, 68, 69, 70, 71, 72, 73, 74, 75, 76, 77, 78, 79, 80, 81, 82, 83, 84, 85, 86, 87, 88, 89, 90, 91, 92, 93, 94, 95, 96, 97, 98, 99, 100, 101, 102, 103, 104, 105, 106, 107, 108, 109, 110, 111, 112, 113, 114, 115, 116, 117, 577, 579, 581, 583, 585, 587, 589, 591, 593, 595, 597, 599, 601, 603, 605, 607, 609, 611, 613, 615, 617, 619, 621, 623, 625, or 627, a variant, derivative, orthologue, paralogue or homologue thereof, in which:

[0591] the amino acid at Mutated site 1 is Val, and the amino acid at Mutated site 5 is Met.

[0592] In another preferred embodiment, the mutated PPO comprises a sequence of SEQ ID NO: 1, 2, 3, 4, 5, 6, 7, 8, 9, 10, 11, 12, 13, 14, 15, 16, 17, 18, 19, 20, 21, 22, 23, 24, 25, 26, 27, 28, 29, 30, 31, 32, 33, 34, 35, 36, 37, 38, 39, 40, 41, 42, 43, 44, 45, 46, 47, 48, 49, 50, 51, 52, 53, 54, 55, 56, 57, 58, 59, 60, 61, 62, 63, 64, 65, 66, 67, 68, 69, 70, 71, 72, 73, 74, 75, 76, 77, 78, 79, 80, 81, 82, 83, 84, 85, 86, 87, 88, 89, 90, 91, 92, 93, 94, 95, 96, 97, 98, 99, 100, 101, 102, 103, 104, 105, 106, 107, 108, 109, 110, 111, 112, 113, 114, 115, 116, 117, 577, 579, 581, 583, 585, 587, 589, 591, 593, 595, 597, 599, 601, 603, 605, 607, 609, 611, 613, 615, 617, 619, 621, 623, 625, or 627, a variant, derivative, orthologue, paralogue or homologue thereof, in which:

[0593] the amino acid at Mutated site 1 is Ile, and the amino acid at Mutated site 5 is Ala.

[0594] In another preferred embodiment, the mutated PPO comprises a sequence of SEQ ID NO: 1, 2, 3, 4, 5, 6, 7, 8, 9, 10, 11, 12, 13, 14, 15, 16, 17, 18, 19, 20, 21, 22, 23, 24, 25, 26, 27, 28, 29, 30, 31, 32, 33, 34, 35, 36, 37, 38, 39, 40, 41, 42, 43, 44, 45, 46, 47, 48, 49, 50, 51, 52, 53, 54, 55, 56, 57, 58, 59, 60, 61, 62, 63, 64, 65, 66, 67, 68, 69, 70, 71, 72, 73, 74, 75, 76, 77, 78, 79, 80, 81, 82, 83, 84, 85, 86, 87, 88, 89, 90, 91, 92, 93, 94, 95, 96, 97, 98, 99, 100, 101, 102, 103, 104, 105, 106, 107, 108, 109, 110, 111, 112, 113, 114, 115, 116, 117, 577, 579, 581, 583, 585, 587, 589, 591, 593, 595, 597, 599, 601, 603, 605, 607, 609, 611, 613, 615, 617, 619, 621, 623, 625, or 627, a variant, derivative, orthologue, paralogue or homologue thereof, in which:

[0595] the amino acid at Mutated site 1 is Ile, and the amino acid at Mutated site 5 is Leu.

[0596] In another preferred embodiment, the mutated PPO comprises a sequence of SEQ ID NO: 1, 2, 3, 4, 5, 6, 7, 8, 9, 10, 11, 12, 13, 14, 15, 16, 17, 18, 19, 20, 21, 22, 23, 24, 25, 26, 27, 28, 29, 30, 31, 32, 33, 34, 35, 36, 37, 38, 39, 40, 41, 42, 43, 44, 45, 46, 47, 48, 49, 50, 51, 52, 53, 54, 55, 56, 57, 58, 59, 60, 61, 62, 63, 64, 65, 66, 67, 68, 69, 70, 71, 72, 73, 74, 75, 76, 77, 78, 79, 80, 81, 82, 83, 84, 85, 86, 87, 88, 89, 90, 91, 92, 93, 94, 95, 96, 97, 98, 99, 100, 101, 102, 103, 104, 105, 106, 107, 108, 109, 110, 111, 112, 113, 114, 115, 116, 117, 577, 579, 581, 583, 585, 587, 589, 591, 593, 595, 597, 599, 601, 603, 605, 607, 609, 611, 613, 615, 617, 619, 621, 623, 625, or 627, a variant, derivative, orthologue, paralogue or homologue thereof, in which:

[0597] the amino acid at Mutated site 1 is Ile, and the amino acid at Mutated site 5 is Val.

[0598] In another preferred embodiment, the mutated PPO comprises a sequence of SEQ ID NO: 1, 2, 3, 4, 5, 6, 7, 8, 9, 10, 11, 12, 13, 14, 15, 16, 17, 18, 19, 20, 21, 22, 23, 24, 25, 26, 27, 28, 29, 30, 31, 32, 33, 34, 35, 36, 37, 38, 39, 40, 41, 42, 43, 44, 45, 46, 47, 48, 49, 50, 51, 52, 53, 54, 55, 56, 57, 58, 59, 60, 61, 62, 63, 64, 65, 66, 67, 68, 69, 70, 71, 72, 73, 74, 75, 76, 77, 78, 79, 80, 81, 82, 83, 84, 85, 86, 87, 88, 89, 90, 91, 92, 93, 94, 95, 96, 97, 98, 99, 100, 101, 102, 103, 104, 105, 106, 107, 108, 109, 110, 111, 112, 113, 114, 115, 116, 117, 577, 579, 581, 583, 585, 587, 589, 591, 593, 595, 597, 599, 601, 603, 605, 607, 609, 611, 613, 615, 617, 619, 621, 623, 625, or 627, a variant, derivative, orthologue, paralogue or homologue thereof, in which:

[0599] the amino acid at Mutated site 1 is Ile, and the amino acid at Mutated site 5 is Ile.

[0600] In another preferred embodiment, the mutated PPO comprises a sequence of SEQ ID NO: 1, 2, 3, 4, 5, 6, 7, 8, 9, 10, 11, 12, 13, 14, 15, 16, 17, 18, 19, 20, 21, 22, 23, 24, 25, 26, 27, 28, 29, 30, 31, 32, 33, 34, 35, 36, 37, 38, 39, 40, 41, 42, 43, 44, 45, 46, 47, 48, 49, 50, 51, 52, 53, 54, 55, 56, 57, 58, 59, 60, 61, 62, 63, 64, 65, 66, 67, 68, 69, 70, 71, 72, 73, 74, 75, 76, 77, 78, 79, 80, 81, 82, 83, 84, 85, 86, 87, 88, 89, 90, 91, 92, 93, 94, 95, 96, 97, 98, 99, 100, 101, 102, 103, 104, 105, 106, 107, 108, 109, 110, 111, 112, 113, 114, 115, 116, 117, 577, 579, 581, 583, 585, 587, 589, 591, 593, 595, 597, 599, 601, 603, 605, 607, 609, 611, 613, 615, 617, 619, 621, 623, 625, or 627, a variant, derivative, orthologue, paralogue or homologue thereof, in which:

[0601] the amino acid at Mutated site 1 is Ile, and the amino acid at Mutated site 5 is Met.

[0602] In another preferred embodiment, the mutated PPO comprises a sequence of SEQ ID NO: 1, 2, 3, 4, 5, 6, 7, 8, 9, 10, 11, 12, 13, 14, 15, 16, 17, 18, 19, 20, 21, 22, 23, 24, 25, 26, 27, 28, 29, 30, 31, 32, 33, 34, 35, 36, 37, 38, 39, 40, 41, 42, 43, 44, 45, 46, 47, 48, 49, 50, 51, 52, 53, 54, 55, 56, 57, 58, 59, 60, 61, 62, 63, 64, 65, 66, 67, 68, 69, 70, 71, 72, 73, 74, 75, 76, 77, 78, 79, 80, 81, 82, 83, 84, 85, 86, 87, 88, 89, 90, 91, 92, 93, 94, 95, 96, 97, 98, 99, 100, 101, 102, 103, 104, 105, 106, 107, 108, 109, 110, 111, 112, 113, 114, 115, 116, 117, 577, 579, 581, 583, 585, 587, 589, 591, 593, 595, 597, 599, 601, 603, 605, 607, 609, 611, 613, 615, 617, 619, 621, 623, 625, or 627, a variant, derivative, orthologue, paralogue or homologue thereof, in which:

[0603] the amino acid at Mutated site 1 is Met, and the amino acid at Mutated site 5 is Ala.

[0604] In another preferred embodiment, the mutated PPO comprises a sequence of SEQ ID NO: 1, 2, 3, 4, 5, 6, 7, 8, 9, 10, 11, 12, 13, 14, 15, 16, 17, 18, 19, 20, 21, 22, 23, 24, 25, 26, 27, 28, 29, 30, 31, 32, 33, 34, 35, 36, 37, 38, 39, 40, 41, 42, 43, 44, 45, 46, 47, 48, 49, 50, 51, 52, 53, 54, 55, 56, 57, 58, 59, 60, 61, 62, 63, 64, 65, 66, 67, 68, 69, 70, 71, 72, 73, 74, 75, 76, 77, 78, 79, 80, 81, 82, 83, 84, 85, 86, 87, 88, 89, 90, 91, 92, 93, 94, 95, 96, 97, 98, 99, 100, 101, 102, 103, 104, 105, 106, 107, 108, 109, 110, 111, 112, 113, 114, 115, 116, 117, 577, 579, 581, 583, 585, 587, 589, 591, 593, 595, 597, 599, 601, 603, 605, 607, 609, 611, 613, 615, 617, 619, 621, 623, 625, or 627, a variant, derivative, orthologue, paralogue or homologue thereof, in which:

[0605] the amino acid at Mutated site 1 is Met, and the amino acid at Mutated site 5 is Leu.

[0606] In another preferred embodiment, the mutated PPO comprises a sequence of SEQ ID NO: 1, 2, 3, 4, 5, 6, 7, 8, 9, 10, 11, 12, 13, 14, 15, 16, 17, 18, 19, 20, 21, 22, 23, 24, 25, 26, 27, 28, 29, 30, 31, 32, 33, 34, 35, 36, 37, 38, 39, 40, 41, 42, 43, 44, 45, 46, 47, 48, 49, 50, 51, 52, 53, 54, 55, 56, 57, 58, 59, 60, 61, 62, 63, 64, 65, 66, 67, 68, 69, 70, 71, 72, 73, 74, 75, 76, 77, 78, 79, 80, 81, 82, 83, 84, 85, 86, 87, 88, 89, 90, 91, 92, 93, 94, 95, 96, 97, 98, 99, 100, 101, 102, 103, 104, 105, 106, 107, 108, 109, 110, 111, 112, 113, 114, 115, 116, 117, 577, 579, 581, 583, 585, 587, 589, 591, 593, 595, 597, 599, 601, 603, 605, 607, 609, 611, 613, 615, 617, 619, 621, 623, 625, or 627, a variant, derivative, orthologue, paralogue or homologue thereof, in which:

[0607] the amino acid at Mutated site 1 is Met, and the amino acid at Mutated site 5 is Val.

[0608] In another preferred embodiment, the mutated PPO comprises a sequence of SEQ ID NO: 1, 2, 3, 4, 5, 6, 7, 8, 9, 10, 11, 12, 13, 14, 15, 16, 17, 18, 19, 20, 21, 22, 23, 24, 25, 26, 27, 28, 29, 30, 31, 32, 33, 34, 35, 36, 37, 38, 39, 40, 41, 42, 43, 44, 45, 46, 47, 48, 49, 50, 51, 52, 53, 54, 55, 56, 57, 58, 59, 60, 61, 62, 63, 64, 65, 66, 67, 68, 69, 70, 71, 72, 73, 74, 75, 76, 77, 78, 79, 80, 81, 82, 83, 84, 85, 86, 87, 88, 89, 90, 91, 92, 93, 94, 95, 96, 97, 98, 99, 100, 101, 102, 103, 104, 105, 106, 107, 108, 109, 110, 111, 112, 113, 114, 115, 116, 117, 577, 579, 581, 583, 585, 587, 589, 591, 593, 595, 597, 599, 601, 603, 605, 607, 609, 611, 613, 615, 617, 619, 621, 623, 625, or 627, a variant, derivative, orthologue, paralogue or homologue thereof, in which:

[0609] the amino acid at Mutated site 1 is Met, and the amino acid at Mutated site 5 is Ile.

[0610] In another preferred embodiment, the mutated PPO comprises a sequence of SEQ ID NO: 1, 2, 3, 4, 5, 6, 7, 8, 9, 10, 11, 12, 13, 14, 15, 16, 17, 18, 19, 20, 21, 22, 23, 24, 25, 26, 27, 28, 29, 30, 31, 32, 33, 34, 35, 36, 37, 38, 39, 40, 41, 42, 43, 44, 45, 46, 47, 48, 49, 50, 51, 52, 53, 54, 55, 56, 57, 58, 59, 60, 61, 62, 63, 64, 65, 66, 67, 68, 69, 70, 71, 72, 73, 74, 75, 76, 77, 78, 79, 80, 81, 82, 83, 84, 85, 86, 87, 88, 89, 90, 91, 92, 93, 94, 95, 96, 97, 98, 99, 100, 101, 102, 103, 104, 105, 106, 107, 108, 109, 110, 111, 112, 113, 114, 115, 116, 117, 577, 579, 581, 583, 585, 587, 589, 591, 593, 595, 597, 599, 601, 603, 605, 607, 609, 611, 613, 615, 617, 619, 621, 623, 625, or 627, a variant, derivative, orthologue, paralogue or homologue thereof, in which:

[0611] the amino acid at Mutated site 1 is Met, and the amino acid at Mutated site 5 is Met.

[0612] In another preferred embodiment, the mutated PPO comprises a sequence of SEQ ID NO: 1, 2, 3, 4, 5, 6, 7, 8, 9, 10, 11, 12, 13, 14, 15, 16, 17, 18, 19, 20, 21, 22, 23, 24, 25, 26, 27, 28, 29, 30, 31, 32, 33, 34, 35, 36, 37, 38, 39, 40, 41, 42, 43, 44, 45, 46, 47, 48, 49, 50, 51, 52, 53, 54, 55, 56, 57, 58, 59, 60, 61, 62, 63, 64, 65, 66, 67, 68, 69, 70, 71, 72, 73, 74, 75, 76, 77, 78, 79, 80, 81, 82, 83, 84, 85, 86, 87, 88, 89, 90, 91, 92, 93, 94, 95, 96, 97, 98, 99, 100, 101, 102, 103, 104, 105, 106, 107, 108, 109, 110, 111, 112, 113, 114, 115, 116, 117, 577, 579, 581, 583, 585, 587, 589, 591, 593, 595, 597, 599, 601, 603, 605, 607, 609, 611, 613, 615, 617, 619, 621, 623, 625, or 627, a variant, derivative, orthologue, paralogue or homologue thereof, in which:

[0613] the amino acid at Mutated site 1 is Tyr, and the amino acid at Mutated site 5 is Ala.

[0614] In another preferred embodiment, the mutated PPO comprises a sequence of SEQ ID NO: 1, 2, 3, 4, 5, 6, 7, 8, 9, 10, 11, 12, 13, 14, 15, 16, 17, 18, 19, 20, 21, 22, 23, 24, 25, 26, 27, 28, 29, 30, 31, 32, 33, 34, 35, 36, 37, 38, 39, 40, 41, 42, 43, 44, 45, 46, 47, 48, 49, 50, 51, 52, 53, 54, 55, 56, 57, 58, 59, 60, 61, 62, 63, 64, 65, 66, 67, 68, 69, 70, 71, 72, 73, 74, 75, 76, 77, 78, 79, 80, 81, 82, 83, 84, 85, 86, 87, 88, 89, 90, 91, 92, 93, 94, 95, 96, 97, 98, 99, 100, 101, 102, 103, 104, 105, 106, 107, 108, 109, 110, 111, 112, 113, 114, 115, 116, 117, 577, 579, 581, 583, 585, 587, 589, 591, 593, 595, 597, 599, 601, 603, 605, 607, 609, 611, 613, 615, 617, 619, 621, 623, 625, or 627, a variant, derivative, orthologue, paralogue or homologue thereof, in which:

[0615] the amino acid at Mutated site 1 is Tyr, and the amino acid at Mutated site 5 is Leu.

[0616] In another preferred embodiment, the mutated PPO comprises a sequence of SEQ ID NO: 1, 2, 3, 4, 5, 6, 7, 8, 9, 10, 11, 12, 13, 14, 15, 16, 17, 18, 19, 20, 21, 22, 23, 24, 25, 26, 27, 28, 29, 30, 31, 32, 33, 34, 35, 36, 37, 38, 39, 40, 41, 42, 43, 44, 45, 46, 47, 48, 49, 50, 51, 52, 53, 54, 55, 56, 57, 58, 59, 60, 61, 62, 63, 64, 65, 66, 67, 68, 69, 70, 71, 72, 73, 74, 75, 76, 77, 78, 79, 80, 81, 82, 83, 84, 85, 86, 87, 88, 89, 90, 91, 92, 93, 94, 95, 96, 97, 98, 99, 100, 101, 102, 103, 104, 105, 106, 107, 108, 109, 110, 111, 112, 113, 114, 115, 116, 117, 577, 579, 581, 583, 585, 587, 589, 591, 593, 595, 597, 599, 601, 603, 605, 607, 609, 611, 613, 615, 617, 619, 621, 623, 625, or 627, a variant, derivative, orthologue, paralogue or homologue thereof, in which:

[0617] the amino acid at Mutated site 1 is Tyr, and the amino acid at Mutated site 5 is Val.

[0618] In another preferred embodiment, the mutated PPO comprises a sequence of SEQ ID NO: 1, 2, 3, 4, 5, 6, 7, 8, 9, 10, 11, 12, 13, 14, 15, 16, 17, 18, 19, 20, 21, 22, 23, 24, 25, 26, 27, 28, 29, 30, 31, 32, 33, 34, 35, 36, 37, 38, 39, 40, 41, 42, 43, 44, 45, 46, 47, 48, 49, 50, 51, 52, 53, 54, 55, 56, 57, 58, 59, 60, 61, 62, 63, 64, 65, 66, 67, 68, 69, 70, 71, 72, 73, 74, 75, 76, 77, 78, 79, 80, 81, 82, 83, 84, 85, 86, 87, 88, 89, 90, 91, 92, 93, 94, 95, 96, 97, 98, 99, 100, 101, 102, 103, 104, 105, 106, 107, 108, 109, 110, 111, 112, 113, 114, 115, 116, 117, 577, 579, 581, 583, 585, 587, 589, 591, 593, 595, 597, 599, 601, 603, 605, 607, 609, 611, 613, 615, 617, 619, 621, 623, 625, or 627, a variant, derivative, orthologue, paralogue or homologue thereof, in which:

[0619] the amino acid at Mutated site 1 is Tyr, and the amino acid at Mutated site 5 is Ile.

[0620] In another preferred embodiment, the mutated PPO comprises a sequence of SEQ ID NO: 1, 2, 3, 4, 5, 6, 7, 8, 9, 10, 11, 12, 13, 14, 15, 16, 17, 18, 19, 20, 21, 22, 23, 24, 25, 26, 27, 28, 29, 30, 31, 32, 33, 34, 35, 36, 37, 38, 39, 40, 41, 42, 43, 44, 45, 46, 47, 48, 49, 50, 51, 52, 53, 54, 55, 56, 57, 58, 59, 60, 61, 62, 63, 64, 65, 66, 67, 68, 69, 70, 71, 72, 73, 74, 75, 76, 77, 78, 79, 80, 81, 82, 83, 84, 85, 86, 87, 88, 89, 90, 91, 92, 93, 94, 95, 96, 97, 98, 99, 100, 101, 102, 103, 104, 105, 106, 107, 108, 109, 110, 111, 112, 113, 114, 115, 116, 117, 577, 579, 581, 583, 585, 587, 589, 591, 593, 595, 597, 599, 601, 603, 605, 607, 609, 611, 613, 615, 617, 619, 621, 623, 625, or 627, a variant, derivative, orthologue, paralogue or homologue thereof, in which:

[0621] the amino acid at Mutated site 1 is Tyr, and the amino acid at Mutated site 5 is Met.

[0622] In another preferred embodiment, the mutated PPO comprises a sequence of SEQ ID NO: 1, 2, 3, 4, 5, 6, 7, 8, 9, 10, 11, 12, 13, 14, 15, 16, 17, 18, 19, 20, 21, 22, 23, 24, 25, 26, 27, 28, 29, 30, 31, 32, 33, 34, 35, 36, 37, 38, 39, 40, 41, 42, 43, 44, 45, 46, 47, 48, 49, 50, 51, 52, 53, 54, 55, 56, 57, 58, 59, 60, 61, 62, 63, 64, 65, 66, 67, 68, 69, 70, 71, 72, 73, 74, 75, 76, 77, 78, 79, 80, 81, 82, 83, 84, 85, 86, 87, 88, 89, 90, 91, 92, 93, 94, 95, 96, 97, 98, 99, 100, 101, 102, 103, 104, 105, 106, 107, 108, 109, 110, 111, 112, 113, 114, 115, 116, 117, 577, 579, 581, 583, 585, 587, 589, 591, 593, 595, 597, 599, 601, 603, 605, 607, 609, 611, 613, 615, 617, 619, 621, 623, 625, or 627, a variant, derivative, orthologue, paralogue or homologue thereof, in which:

[0623] the amino acid at Mutated site 1 is Gly, and the amino acid at Mutated site 5 is Ala.

[0624] In another preferred embodiment, the mutated PPO comprises a sequence of SEQ ID NO: 1, 2, 3, 4, 5, 6, 7, 8, 9, 10, 11, 12, 13, 14, 15, 16, 17, 18, 19, 20, 21, 22, 23, 24, 25, 26, 27, 28, 29, 30, 31, 32, 33, 34, 35, 36, 37, 38, 39, 40, 41, 42, 43, 44, 45, 46, 47, 48, 49, 50, 51, 52, 53, 54, 55, 56, 57, 58, 59, 60, 61, 62, 63, 64, 65, 66, 67, 68, 69, 70, 71, 72, 73, 74, 75, 76, 77, 78, 79, 80, 81, 82, 83, 84, 85, 86, 87, 88, 89, 90, 91, 92, 93, 94, 95, 96, 97, 98, 99, 100, 101, 102, 103, 104, 105, 106, 107, 108, 109, 110, 111, 112, 113, 114, 115, 116, 117, 577, 579, 581, 583, 585, 587, 589, 591, 593, 595, 597, 599, 601, 603, 605, 607, 609, 611, 613, 615, 617, 619, 621, 623, 625, or 627, a variant, derivative, orthologue, paralogue or homologue thereof, in which:

[0625] the amino acid at Mutated site 1 is Gly, and the amino acid at Mutated site 5 is Leu.

[0626] In another preferred embodiment, the mutated PPO comprises a sequence of SEQ ID NO: 1, 2, 3, 4, 5, 6, 7, 8, 9, 10, 11, 12, 13, 14, 15, 16, 17, 18, 19, 20, 21, 22, 23, 24, 25, 26, 27, 28, 29, 30, 31, 32, 33, 34, 35, 36, 37, 38, 39, 40, 41, 42, 43, 44, 45, 46, 47, 48, 49, 50, 51, 52, 53, 54, 55, 56, 57, 58, 59, 60, 61, 62, 63, 64, 65, 66, 67, 68, 69, 70, 71, 72, 73, 74, 75, 76, 77, 78, 79, 80, 81, 82, 83, 84, 85, 86, 87, 88, 89, 90, 91, 92, 93, 94, 95, 96, 97, 98, 99, 100, 101, 102, 103, 104, 105, 106, 107, 108, 109, 110, 111, 112, 113, 114, 115, 116, 117, 577, 579, 581, 583, 585, 587, 589, 591, 593, 595, 597, 599, 601, 603, 605, 607, 609, 611, 613, 615, 617, 619, 621, 623, 625, or 627, a variant, derivative, orthologue, paralogue or homologue thereof, in which:

[0627] the amino acid at Mutated site 1 is Gly, and the amino acid at Mutated site 5 is Val.

[0628] In another preferred embodiment, the mutated PPO comprises a sequence of SEQ ID NO: 1, 2, 3, 4, 5, 6, 7, 8, 9, 10, 11, 12, 13, 14, 15, 16, 17, 18, 19, 20, 21, 22, 23, 24, 25, 26, 27, 28, 29, 30, 31, 32, 33, 34, 35, 36, 37, 38, 39, 40, 41, 42, 43, 44, 45, 46, 47, 48, 49, 50, 51, 52, 53, 54, 55, 56, 57, 58, 59, 60, 61, 62, 63, 64, 65, 66, 67, 68, 69, 70, 71, 72, 73, 74, 75, 76, 77, 78, 79, 80, 81, 82, 83, 84, 85, 86, 87, 88, 89, 90, 91, 92, 93, 94, 95, 96, 97, 98, 99, 100, 101, 102, 103, 104, 105, 106, 107, 108, 109, 110, 111, 112, 113, 114, 115, 116, 117, 577, 579, 581, 583, 585, 587, 589, 591, 593, 595, 597, 599, 601, 603, 605, 607, 609, 611, 613, 615, 617, 619, 621, 623, 625, or 627, a variant, derivative, orthologue, paralogue or homologue thereof, in which:

[0629] the amino acid at Mutated site 1 is Gly, and the amino acid at Mutated site 5 is Ile.

[0630] In another preferred embodiment, the mutated PPO comprises a sequence of SEQ ID NO: 1, 2, 3, 4, 5, 6, 7, 8, 9, 10, 11, 12, 13, 14, 15, 16, 17, 18, 19, 20, 21, 22, 23, 24, 25, 26, 27, 28, 29, 30, 31, 32, 33, 34, 35, 36, 37, 38, 39, 40, 41, 42, 43, 44, 45, 46, 47, 48, 49, 50, 51, 52, 53, 54, 55, 56, 57, 58, 59, 60, 61, 62, 63, 64, 65, 66, 67, 68, 69, 70, 71, 72, 73, 74, 75, 76, 77, 78, 79, 80, 81, 82, 83, 84, 85, 86, 87, 88, 89, 90, 91, 92, 93, 94, 95, 96, 97, 98, 99, 100, 101, 102, 103, 104, 105, 106, 107, 108, 109, 110, 111, 112, 113, 114, 115, 116, 117, 577, 579, 581, 583, 585, 587, 589, 591, 593, 595, 597, 599, 601, 603, 605, 607, 609, 611, 613, 615, 617, 619, 621, 623, 625, or 627, a variant, derivative, orthologue, paralogue or homologue thereof, in which:

[0631] the amino acid at Mutated site 1 is Gly, and the amino acid at Mutated site 5 is Met. In another preferred embodiment, the mutated PPO comprises a sequence of SEQ ID NO: 1, 2, 3, 4, 5, 6, 7, 8, 9, 10, 11, 12, 13, 14, 15, 16, 17, 18, 19, 20, 21, 22, 23, 24, 25, 26, 27, 28, 29, 30, 31, 32, 33, 34, 35, 36, 37, 38, 39, 40, 41, 42, 43, 44, 45, 46, 47, 48, 49, 50, 51, 52, 53, 54, 55, 56, 57, 58, 59, 60, 61, 62, 63, 64, 65, 66, 67, 68, 69, 70, 71, 72, 73, 74, 75, 76, 77, 78, 79, 80, 81, 82, 83, 84, 85, 86, 87, 88, 89, 90, 91, 92, 93, 94, 95, 96, 97, 98, 99, 100, 101, 102, 103, 104, 105, 106, 107, 108, 109, 110, 111, 112, 113, 114, 115, 116, 117, 577, 579, 581, 583, 585, 587, 589, 591, 593, 595, 597, 599, 601, 603, 605, 607, 609, 611, 613, 615, 617, 619, 621, 623, 625, or 627, a variant, derivative, orthologue, paralogue or homologue thereof, in which:

[0632] the amino acid at Mutated site 1 is Asn, and the amino acid at Mutated site 5 is Ala.

[0633] In another preferred embodiment, the mutated PPO comprises a sequence of SEQ ID NO: 1, 2, 3, 4, 5, 6, 7, 8, 9, 10, 11, 12, 13, 14, 15, 16, 17, 18, 19, 20, 21, 22, 23, 24, 25, 26, 27, 28, 29, 30, 31, 32, 33, 34, 35, 36, 37, 38, 39, 40, 41, 42, 43, 44, 45, 46, 47, 48, 49, 50, 51, 52, 53, 54, 55, 56, 57, 58, 59, 60, 61, 62, 63, 64, 65, 66, 67, 68, 69, 70, 71, 72, 73, 74, 75, 76, 77, 78, 79, 80, 81, 82, 83, 84, 85, 86, 87, 88, 89, 90, 91, 92, 93, 94, 95, 96, 97, 98, 99, 100, 101, 102, 103, 104, 105, 106, 107, 108, 109, 110, 111, 112, 113, 114, 115, 116, 117, 577, 579, 581, 583, 585, 587, 589, 591, 593, 595, 597, 599, 601, 603, 605, 607, 609, 611, 613, 615, 617, 619, 621, 623, 625, or 627, a variant, derivative, orthologue, paralogue or homologue thereof, in which:

[0634] the amino acid at Mutated site 1 is Asn, and the amino acid at Mutated site 5 is Leu.

[0635] In another preferred embodiment, the mutated PPO comprises a sequence of SEQ ID NO: 1, 2, 3, 4, 5, 6, 7, 8, 9, 10, 11, 12, 13, 14, 15, 16, 17, 18, 19, 20, 21, 22, 23, 24, 25, 26, 27, 28, 29, 30, 31, 32, 33, 34, 35, 36, 37, 38, 39, 40, 41, 42, 43, 44, 45, 46, 47, 48, 49, 50, 51, 52, 53, 54, 55, 56, 57, 58, 59, 60, 61, 62, 63, 64, 65, 66, 67, 68, 69, 70, 71, 72, 73, 74, 75, 76, 77, 78, 79, 80, 81, 82, 83, 84, 85, 86, 87, 88, 89, 90, 91, 92, 93, 94, 95, 96, 97, 98, 99, 100, 101, 102, 103, 104, 105, 106, 107, 108, 109, 110, 111, 112, 113, 114, 115, 116, 117, 577, 579, 581, 583, 585, 587, 589, 591, 593, 595, 597, 599, 601, 603, 605, 607, 609, 611, 613, 615, 617, 619, 621, 623, 625, or 627, a variant, derivative, orthologue, paralogue or homologue thereof, in which:

[0636] the amino acid at Mutated site 1 is Asn, and the amino acid at Mutated site 5 is Val.

[0637] In another preferred embodiment, the mutated PPO comprises a sequence of SEQ ID NO: 1, 2, 3, 4, 5, 6, 7, 8, 9, 10, 11, 12, 13, 14, 15, 16, 17, 18, 19, 20, 21, 22, 23, 24, 25, 26, 27, 28, 29, 30, 31, 32, 33, 34, 35, 36, 37, 38, 39, 40, 41, 42, 43, 44, 45, 46, 47, 48, 49, 50, 51, 52, 53, 54, 55, 56, 57, 58, 59, 60, 61, 62, 63, 64, 65, 66, 67, 68, 69, 70, 71, 72, 73, 74, 75, 76, 77, 78, 79, 80, 81, 82, 83, 84, 85, 86, 87, 88, 89, 90, 91, 92, 93, 94, 95, 96, 97, 98, 99, 100, 101, 102, 103, 104, 105, 106, 107, 108, 109, 110, 111, 112, 113, 114, 115, 116, 117, 577, 579, 581, 583, 585, 587, 589, 591, 593, 595, 597, 599, 601, 603, 605, 607, 609, 611, 613, 615, 617, 619, 621, 623, 625, or 627, a variant, derivative, orthologue, paralogue or homologue thereof, in which:

[0638] the amino acid at Mutated site 1 is Asn, and the amino acid at Mutated site 5 is Ile.

[0639] In another preferred embodiment, the mutated PPO comprises a sequence of SEQ ID NO: 1, 2, 3, 4, 5, 6, 7, 8, 9, 10, 11, 12, 13, 14, 15, 16, 17, 18, 19, 20, 21, 22, 23, 24, 25, 26, 27, 28, 29, 30, 31, 32, 33, 34, 35, 36, 37, 38, 39, 40, 41, 42, 43, 44, 45, 46, 47, 48, 49, 50, 51, 52, 53, 54, 55, 56, 57, 58, 59, 60, 61, 62, 63, 64, 65, 66, 67, 68, 69, 70, 71, 72, 73, 74, 75, 76, 77, 78, 79, 80, 81, 82, 83, 84, 85, 86, 87, 88, 89, 90, 91, 92, 93, 94, 95, 96, 97, 98, 99, 100, 101, 102, 103, 104, 105, 106, 107, 108, 109, 110, 111, 112, 113, 114, 115, 116, 117, 577, 579, 581, 583, 585, 587, 589, 591, 593, 595, 597, 599, 601, 603, 605, 607, 609, 611, 613, 615, 617, 619, 621, 623, 625, or 627, a variant, derivative, orthologue, paralogue or homologue thereof, in which:

[0640] the amino acid at Mutated site 1 is Asn, and the amino acid at Mutated site 5 is Met.

[0641] In another preferred embodiment, the mutated PPO comprises a sequence of SEQ ID NO: 1, 2, 3, 4, 5, 6, 7, 8, 9, 10, 11, 12, 13, 14, 15, 16, 17, 18, 19, 20, 21, 22, 23, 24, 25, 26, 27, 28, 29, 30, 31, 32, 33, 34, 35, 36, 37, 38, 39, 40, 41, 42, 43, 44, 45, 46, 47, 48, 49, 50, 51, 52, 53, 54, 55, 56, 57, 58, 59, 60, 61, 62, 63, 64, 65, 66, 67, 68, 69, 70, 71, 72, 73, 74, 75, 76, 77, 78, 79, 80, 81, 82, 83, 84, 85, 86, 87, 88, 89, 90, 91, 92, 93, 94, 95, 96, 97, 98, 99, 100, 101, 102, 103, 104, 105, 106, 107, 108, 109, 110, 111, 112, 113, 114, 115, 116, 117, 577, 579, 581, 583, 585, 587, 589, 591, 593, 595, 597, 599, 601, 603, 605, 607, 609, 611, 613, 615, 617, 619, 621, 623, 625, or 627, a variant, derivative, orthologue, paralogue or homologue thereof, in which:

[0642] the amino acid at Mutated site 1 is Cys, and the amino acid at Mutated site 5 is Ala.

[0643] In another preferred embodiment, the mutated PPO comprises a sequence of SEQ ID NO: 1, 2, 3, 4, 5, 6, 7, 8, 9, 10, 11, 12, 13, 14, 15, 16, 17, 18, 19, 20, 21, 22, 23, 24, 25, 26, 27, 28, 29, 30, 31, 32, 33, 34, 35, 36, 37, 38, 39, 40, 41, 42, 43, 44, 45, 46, 47, 48, 49, 50, 51, 52, 53, 54, 55, 56, 57, 58, 59, 60, 61, 62, 63, 64, 65, 66, 67, 68, 69, 70, 71, 72, 73, 74, 75, 76, 77, 78, 79, 80, 81, 82, 83, 84, 85, 86, 87, 88, 89, 90, 91, 92, 93, 94, 95, 96, 97, 98, 99, 100, 101, 102, 103, 104, 105, 106, 107, 108, 109, 110, 111, 112, 113, 114, 115, 116, 117, 577, 579, 581, 583, 585, 587, 589, 591, 593, 595, 597, 599, 601, 603, 605, 607, 609, 611, 613, 615, 617, 619, 621, 623, 625, or 627, a variant, derivative, orthologue, paralogue or homologue thereof, in which:

[0644] the amino acid at Mutated site 1 is Cys, and the amino acid at Mutated site 5 is Leu.

[0645] In another preferred embodiment, the mutated PPO comprises a sequence of SEQ ID NO: 1, 2, 3, 4, 5, 6, 7, 8, 9, 10, 11, 12, 13, 14, 15, 16, 17, 18, 19, 20, 21, 22, 23, 24, 25, 26, 27, 28, 29, 30, 31, 32, 33, 34, 35, 36, 37, 38, 39, 40, 41, 42, 43, 44, 45, 46, 47, 48, 49, 50, 51, 52, 53, 54, 55, 56, 57, 58, 59, 60, 61, 62, 63, 64, 65, 66, 67, 68, 69, 70, 71, 72, 73, 74, 75, 76, 77, 78, 79, 80, 81, 82, 83, 84, 85, 86, 87, 88, 89, 90, 91, 92, 93, 94, 95, 96, 97, 98, 99, 100, 101, 102, 103, 104, 105, 106, 107, 108, 109, 110, 111, 112, 113, 114, 115, 116, 117, 577, 579, 581, 583, 585, 587, 589, 591, 593, 595, 597, 599, 601, 603, 605, 607, 609, 611, 613, 615, 617, 619, 621, 623, 625, or 627, a variant, derivative, orthologue, paralogue or homologue thereof, in which:

[0646] the amino acid at Mutated site 1 is Cys, and the amino acid at Mutated site 5 is Val.

[0647] In another preferred embodiment, the mutated PPO comprises a sequence of SEQ ID NO: 1, 2, 3, 4, 5, 6, 7, 8, 9, 10, 11, 12, 13, 14, 15, 16, 17, 18, 19, 20, 21, 22, 23, 24, 25, 26, 27, 28, 29, 30, 31, 32, 33, 34, 35, 36, 37, 38, 39, 40, 41, 42, 43, 44, 45, 46, 47, 48, 49, 50, 51, 52, 53, 54, 55, 56, 57, 58, 59, 60, 61, 62, 63, 64, 65, 66, 67, 68, 69, 70, 71, 72, 73, 74, 75, 76, 77, 78, 79, 80, 81, 82, 83, 84, 85, 86, 87, 88, 89, 90, 91, 92, 93, 94, 95, 96, 97, 98, 99, 100, 101, 102, 103, 104, 105, 106, 107, 108, 109, 110, 111, 112, 113, 114, 115, 116, 117, 577, 579, 581, 583, 585, 587, 589, 591, 593, 595, 597, 599, 601, 603, 605, 607, 609, 611, 613, 615, 617, 619, 621, 623, 625, or 627, a variant, derivative, orthologue, paralogue or homologue thereof, in which:

[0648] the amino acid at Mutated site 1 is Cys, and the amino acid at Mutated site 5 is Ile.

[0649] In another preferred embodiment, the mutated PPO comprises a sequence of SEQ ID NO: 1, 2, 3, 4, 5, 6, 7, 8, 9, 10, 11, 12, 13, 14, 15, 16, 17, 18, 19, 20, 21, 22, 23, 24, 25, 26, 27, 28, 29, 30, 31, 32, 33, 34, 35, 36, 37, 38, 39, 40, 41, 42, 43, 44, 45, 46, 47, 48, 49, 50, 51, 52, 53, 54, 55, 56, 57, 58, 59, 60, 61, 62, 63, 64, 65, 66, 67, 68, 69, 70, 71, 72, 73, 74, 75, 76, 77, 78, 79, 80, 81, 82, 83, 84, 85, 86, 87, 88, 89, 90, 91, 92, 93, 94, 95, 96, 97, 98, 99, 100, 101, 102, 103, 104, 105, 106, 107, 108, 109, 110, 111, 112, 113, 114, 115, 116, 117, 577, 579, 581, 583, 585, 587, 589, 591, 593, 595, 597, 599, 601, 603, 605, 607, 609, 611, 613, 615, 617, 619, 621, 623, 625, or 627, a variant, derivative, orthologue, paralogue or homologue thereof, in which:

[0650] the amino acid at Mutated site 1 is Cys, and the amino acid at Mutated site 5 is Met.

[0651] In another preferred embodiment, the mutated PPO comprises a sequence of SEQ ID NO: 1, 2, 3, 4, 5, 6, 7, 8, 9, 10, 11, 12, 13, 14, 15, 16, 17, 18, 19, 20, 21, 22, 23, 24, 25, 26, 27, 28, 29, 30, 31, 32, 33, 34, 35, 36, 37, 38, 39, 40, 41, 42, 43, 44, 45, 46, 47, 48, 49, 50, 51, 52, 53, 54, 55, 56, 57, 58, 59, 60, 61, 62, 63, 64, 65, 66, 67, 68, 69, 70, 71, 72, 73, 74, 75, 76, 77, 78, 79, 80, 81, 82, 83, 84, 85, 86, 87, 88, 89, 90, 91, 92, 93, 94, 95, 96, 97, 98, 99, 100, 101, 102, 103, 104, 105, 106, 107, 108, 109, 110, 111, 112, 113, 114, 115, 116, 117, 577, 579, 581, 583, 585, 587, 589, 591, 593, 595, 597, 599, 601, 603, 605, 607, 609, 611, 613, 615, 617, 619, 621, 623, 625, or 627, a variant, derivative, orthologue, paralogue or homologue thereof, in which:

[0652] the amino acid at Mutated site 1 is Phe, and the amino acid at Mutated site 5 is Ala.

[0653] In another preferred embodiment, the mutated PPO comprises a sequence of SEQ ID NO: 1, 2, 3, 4, 5, 6, 7, 8, 9, 10, 11, 12, 13, 14, 15, 16, 17, 18, 19, 20, 21, 22, 23, 24, 25, 26, 27, 28, 29, 30, 31, 32, 33, 34, 35, 36, 37, 38, 39, 40, 41, 42, 43, 44, 45, 46, 47, 48, 49, 50, 51, 52, 53, 54, 55, 56, 57, 58, 59, 60, 61, 62, 63, 64, 65, 66, 67, 68, 69, 70, 71, 72, 73, 74, 75, 76, 77, 78, 79, 80, 81, 82, 83, 84, 85, 86, 87, 88, 89, 90, 91, 92, 93, 94, 95, 96, 97, 98, 99, 100, 101, 102, 103, 104, 105, 106, 107, 108, 109, 110, 111, 112, 113, 114, 115, 116, 117, 577, 579, 581, 583, 585, 587, 589, 591, 593, 595, 597, 599, 601, 603, 605, 607, 609, 611, 613, 615, 617, 619, 621, 623, 625, or 627, a variant, derivative, orthologue, paralogue or homologue thereof, in which:

[0654] the amino acid at Mutated site 1 is Phe, and the amino acid at Mutated site 5 is Leu.

[0655] In another preferred embodiment, the mutated PPO comprises a sequence of SEQ ID NO: 1, 2, 3, 4, 5, 6, 7, 8, 9, 10, 11, 12, 13, 14, 15, 16, 17, 18, 19, 20, 21, 22, 23, 24, 25, 26, 27, 28, 29, 30, 31, 32, 33, 34, 35, 36, 37, 38, 39, 40, 41, 42, 43, 44, 45, 46, 47, 48, 49, 50, 51, 52, 53, 54, 55, 56, 57, 58, 59, 60, 61, 62, 63, 64, 65, 66, 67, 68, 69, 70, 71, 72, 73, 74, 75, 76, 77, 78, 79, 80, 81, 82, 83, 84, 85, 86, 87, 88, 89, 90, 91, 92, 93, 94, 95, 96, 97, 98, 99, 100, 101, 102, 103, 104, 105, 106, 107, 108, 109, 110, 111, 112, 113, 114, 115, 116, 117, 577, 579, 581, 583, 585, 587, 589, 591, 593, 595, 597, 599, 601, 603, 605, 607, 609, 611, 613, 615, 617, 619, 621, 623, 625, or 627, a variant, derivative, orthologue, paralogue or homologue thereof, in which:

[0656] the amino acid at Mutated site 1 is Phe, and the amino acid at Mutated site 5 is Val.

[0657] In another preferred embodiment, the mutated PPO comprises a sequence of SEQ ID NO: 1, 2, 3, 4, 5, 6, 7, 8, 9, 10, 11, 12, 13, 14, 15, 16, 17, 18, 19, 20, 21, 22, 23, 24, 25, 26, 27, 28, 29, 30, 31, 32, 33, 34, 35, 36, 37, 38, 39, 40, 41, 42, 43, 44, 45, 46, 47, 48, 49, 50, 51, 52, 53, 54, 55, 56, 57, 58, 59, 60, 61, 62, 63, 64, 65, 66, 67, 68, 69, 70, 71, 72, 73, 74, 75, 76, 77, 78, 79, 80, 81, 82, 83, 84, 85, 86, 87, 88, 89, 90, 91, 92, 93, 94, 95, 96, 97, 98, 99, 100, 101, 102, 103, 104, 105, 106, 107, 108, 109, 110, 111, 112, 113, 114, 115, 116, 117, 577, 579, 581, 583, 585, 587, 589, 591, 593, 595, 597, 599, 601, 603, 605, 607, 609, 611, 613, 615, 617, 619, 621, 623, 625, or 627, a variant, derivative, orthologue, paralogue or homologue thereof, in which:

[0658] the amino acid at Mutated site 1 is Phe, and the amino acid at Mutated site 5 is Ile.

[0659] In another preferred embodiment, the mutated PPO comprises a sequence of SEQ ID NO: 1, 2, 3, 4, 5, 6, 7, 8, 9, 10, 11, 12, 13, 14, 15, 16, 17, 18, 19, 20, 21, 22, 23, 24, 25, 26, 27, 28, 29, 30, 31, 32, 33, 34, 35, 36, 37, 38, 39, 40, 41, 42, 43, 44, 45, 46, 47, 48, 49, 50, 51, 52, 53, 54, 55, 56, 57, 58, 59, 60, 61, 62, 63, 64, 65, 66, 67, 68, 69, 70, 71, 72, 73, 74, 75, 76, 77, 78, 79, 80, 81, 82, 83, 84, 85, 86, 87, 88, 89, 90, 91, 92, 93, 94, 95, 96, 97, 98, 99, 100, 101, 102, 103, 104, 105, 106, 107, 108, 109, 110, 111, 112, 113, 114, 115, 116, 117, 577, 579, 581, 583, 585, 587, 589, 591, 593, 595, 597, 599, 601, 603, 605, 607, 609, 611, 613, 615, 617, 619, 621, 623, 625, or 627, a variant, derivative, orthologue, paralogue or homologue thereof, in which:

[0660] the amino acid at Mutated site 1 is Phe, and the amino acid at Mutated site 5 is Met.

[0661] In another preferred embodiment, the mutated PPO comprises a sequence of SEQ ID NO: 1, 2, 3, 4, 5, 6, 7, 8, 9, 10, 11, 12, 13, 14, 15, 16, 17, 18, 19, 20, 21, 22, 23, 24, 25, 26, 27, 28, 29, 30, 31, 32, 33, 34, 35, 36, 37, 38, 39, 40, 41, 42, 43, 44, 45, 46, 47, 48, 49, 50, 51, 52, 53, 54, 55, 56, 57, 58, 59, 60, 61, 62, 63, 64, 65, 66, 67, 68, 69, 70, 71, 72, 73, 74, 75, 76, 77, 78, 79, 80, 81, 82, 83, 84, 85, 86, 87, 88, 89, 90, 91, 92, 93, 94, 95, 96, 97, 98, 99, 100, 101, 102, 103, 104, 105, 106, 107, 108, 109, 110, 111, 112, 113, 114, 115, 116, 117, 577, 579, 581, 583, 585, 587, 589, 591, 593, 595, 597, 599, 601, 603, 605, 607, 609, 611, 613, 615, 617, 619, 621, 623, 625, or 627, a variant, derivative, orthologue, paralogue or homologue thereof, in which:

[0662] the amino acid at Mutated site 1 is Ser, and the amino acid at Mutated site 5 is Ala.

[0663] In another preferred embodiment, the mutated PPO comprises a sequence of SEQ ID NO: 1, 2, 3, 4, 5, 6, 7, 8, 9, 10, 11, 12, 13, 14, 15, 16, 17, 18, 19, 20, 21, 22, 23, 24, 25, 26, 27, 28, 29, 30, 31, 32, 33, 34, 35, 36, 37, 38, 39, 40, 41, 42, 43, 44, 45, 46, 47, 48, 49, 50, 51, 52, 53, 54, 55, 56, 57, 58, 59, 60, 61, 62, 63, 64, 65, 66, 67, 68, 69, 70, 71, 72, 73, 74, 75, 76, 77, 78, 79, 80, 81, 82, 83, 84, 85, 86, 87, 88, 89, 90, 91, 92, 93, 94, 95, 96, 97, 98, 99, 100, 101, 102, 103, 104, 105, 106, 107, 108, 109, 110, 111, 112, 113, 114, 115, 116, 117, 577, 579, 581, 583, 585, 587, 589, 591, 593, 595, 597, 599, 601, 603, 605, 607, 609, 611, 613, 615, 617, 619, 621, 623, 625, or 627, a variant, derivative, orthologue, paralogue or homologue thereof, in which:

[0664] the amino acid at Mutated site 1 is Ser, and the amino acid at Mutated site 5 is Leu.

[0665] In another preferred embodiment, the mutated PPO comprises a sequence of SEQ ID NO: 1, 2, 3, 4, 5, 6, 7, 8, 9, 10, 11, 12, 13, 14, 15, 16, 17, 18, 19, 20, 21, 22, 23, 24, 25, 26, 27, 28, 29, 30, 31, 32, 33, 34, 35, 36, 37, 38, 39, 40, 41, 42, 43, 44, 45, 46, 47, 48, 49, 50, 51, 52, 53, 54, 55, 56, 57, 58, 59, 60, 61, 62, 63, 64, 65, 66, 67, 68, 69, 70, 71, 72, 73, 74, 75, 76, 77, 78, 79, 80, 81, 82, 83, 84, 85, 86, 87, 88, 89, 90, 91, 92, 93, 94, 95, 96, 97, 98, 99, 100, 101, 102, 103, 104, 105, 106, 107, 108, 109, 110, 111, 112, 113, 114, 115, 116, 117, 577, 579, 581, 583, 585, 587, 589, 591, 593, 595, 597, 599, 601, 603, 605, 607, 609, 611, 613, 615, 617, 619, 621, 623, 625, or 627, a variant, derivative, orthologue, paralogue or homologue thereof, in which:

[0666] the amino acid at Mutated site 1 is Ser, and the amino acid at Mutated site 5 is Val.

[0667] In another preferred embodiment, the mutated PPO comprises a sequence of SEQ ID NO: 1, 2, 3, 4, 5, 6, 7, 8, 9, 10, 11, 12, 13, 14, 15, 16, 17, 18, 19, 20, 21, 22, 23, 24, 25, 26, 27, 28, 29, 30, 31, 32, 33, 34, 35, 36, 37, 38, 39, 40, 41, 42, 43, 44, 45, 46, 47, 48, 49, 50, 51, 52, 53, 54, 55, 56, 57, 58, 59, 60, 61, 62, 63, 64, 65, 66, 67, 68, 69, 70, 71, 72, 73, 74, 75, 76, 77, 78, 79, 80, 81, 82, 83, 84, 85, 86, 87, 88, 89, 90, 91, 92, 93, 94, 95, 96, 97, 98, 99, 100, 101, 102, 103, 104, 105, 106, 107, 108, 109, 110, 111, 112, 113, 114, 115, 116, 117, 577, 579, 581, 583, 585, 587, 589, 591, 593, 595, 597, 599, 601, 603, 605, 607, 609, 611, 613, 615, 617, 619, 621, 623, 625, or 627, a variant, derivative, orthologue, paralogue or homologue thereof, in which:

[0668] the amino acid at Mutated site 1 is Ser, and the amino acid at Mutated site 5 is Ile.

[0669] In another preferred embodiment, the mutated PPO comprises a sequence of SEQ ID NO: 1, 2, 3, 4, 5, 6, 7, 8, 9, 10, 11, 12, 13, 14, 15, 16, 17, 18, 19, 20, 21, 22, 23, 24, 25, 26, 27, 28, 29, 30, 31, 32, 33, 34, 35, 36, 37, 38, 39, 40, 41, 42, 43, 44, 45, 46, 47, 48, 49, 50, 51, 52, 53, 54, 55, 56, 57, 58, 59, 60, 61, 62, 63, 64, 65, 66, 67, 68, 69, 70, 71, 72, 73, 74, 75, 76, 77, 78, 79, 80, 81, 82, 83, 84, 85, 86, 87, 88, 89, 90, 91, 92, 93, 94, 95, 96, 97, 98, 99, 100, 101, 102, 103, 104, 105, 106, 107, 108, 109, 110, 111, 112, 113, 114, 115, 116, 117, 577, 579, 581, 583, 585, 587, 589, 591, 593, 595, 597, 599, 601, 603, 605, 607, 609, 611, 613, 615, 617, 619, 621, 623, 625, or 627, a variant, derivative, orthologue, paralogue or homologue thereof, in which:

[0670] the amino acid at Mutated site 1 is Ser, and the amino acid at Mutated site 5 is Met.

[0671] In another preferred embodiment, the mutated PPO comprises a sequence of SEQ ID NO: 1, 2, 3, 4, 5, 6, 7, 8, 9, 10, 11, 12, 13, 14, 15, 16, 17, 18, 19, 20, 21, 22, 23, 24, 25, 26, 27, 28, 29, 30, 31, 32, 33, 34, 35, 36, 37, 38, 39, 40, 41, 42, 43, 44, 45, 46, 47, 48, 49, 50, 51, 52, 53, 54, 55, 56, 57, 58, 59, 60, 61, 62, 63, 64, 65, 66, 67, 68, 69, 70, 71, 72, 73, 74, 75, 76, 77, 78, 79, 80, 81, 82, 83, 84, 85, 86, 87, 88, 89, 90, 91, 92, 93, 94, 95, 96, 97, 98, 99, 100, 101, 102, 103, 104, 105, 106, 107, 108, 109, 110, 111, 112, 113, 114, 115, 116, 117, 577, 579, 581, 583, 585, 587, 589, 591, 593, 595, 597, 599, 601, 603, 605, 607, 609, 611, 613, 615, 617, 619, 621, 623, 625, or 627, a variant, derivative, orthologue, paralogue or homologue thereof, in which:

[0672] the amino acid at Mutated site 1 is Thr, and the amino acid at Mutated site 5 is Ala.

[0673] In another preferred embodiment, the mutated PPO comprises a sequence of SEQ ID NO: 1, 2, 3, 4, 5, 6, 7, 8, 9, 10, 11, 12, 13, 14, 15, 16, 17, 18, 19, 20, 21, 22, 23, 24, 25, 26, 27, 28, 29, 30, 31, 32, 33, 34, 35, 36, 37, 38, 39, 40, 41, 42, 43, 44, 45, 46, 47, 48, 49, 50, 51, 52, 53, 54, 55, 56, 57, 58, 59, 60, 61, 62, 63, 64, 65, 66, 67, 68, 69, 70, 71, 72, 73, 74, 75, 76, 77, 78, 79, 80, 81, 82, 83, 84, 85, 86, 87, 88, 89, 90, 91, 92, 93, 94, 95, 96, 97, 98, 99, 100, 101, 102, 103, 104, 105, 106, 107, 108, 109, 110, 111, 112, 113, 114, 115, 116, 117, 577, 579, 581, 583, 585, 587, 589, 591, 593, 595, 597, 599, 601, 603, 605, 607, 609, 611, 613, 615, 617, 619, 621, 623, 625, or 627, a variant, derivative, orthologue, paralogue or homologue thereof, in which:

[0674] the amino acid at Mutated site 1 is Thr, and the amino acid at Mutated site 5 is Leu.

[0675] In another preferred embodiment, the mutated PPO comprises a sequence of SEQ ID NO: 1, 2, 3, 4, 5, 6, 7, 8, 9, 10, 11, 12, 13, 14, 15, 16, 17, 18, 19, 20, 21, 22, 23, 24, 25, 26, 27, 28, 29, 30, 31, 32, 33, 34, 35, 36, 37, 38, 39, 40, 41, 42, 43, 44, 45, 46, 47, 48, 49, 50, 51, 52, 53, 54, 55, 56, 57, 58, 59, 60, 61, 62, 63, 64, 65, 66, 67, 68, 69, 70, 71, 72, 73, 74, 75, 76, 77, 78, 79, 80, 81, 82, 83, 84, 85, 86, 87, 88, 89, 90, 91, 92, 93, 94, 95, 96, 97, 98, 99, 100, 101, 102, 103, 104, 105, 106, 107, 108, 109, 110, 111, 112, 113, 114, 115, 116, 117, 577, 579, 581, 583, 585, 587, 589, 591, 593, 595, 597, 599, 601, 603, 605, 607, 609, 611, 613, 615, 617, 619, 621, 623, 625, or 627, a variant, derivative, orthologue, paralogue or homologue thereof, in which:

[0676] the amino acid at Mutated site 1 is Thr, and the amino acid at Mutated site 5 is Val.

[0677] In another preferred embodiment, the mutated PPO comprises a sequence of SEQ ID NO: 1, 2, 3, 4, 5, 6, 7, 8, 9, 10, 11, 12, 13, 14, 15, 16, 17, 18, 19, 20, 21, 22, 23, 24, 25, 26, 27, 28, 29, 30, 31, 32, 33, 34, 35, 36, 37, 38, 39, 40, 41, 42, 43, 44, 45, 46, 47, 48, 49, 50, 51, 52, 53, 54, 55, 56, 57, 58, 59, 60, 61, 62, 63, 64, 65, 66, 67, 68, 69, 70, 71, 72, 73, 74, 75, 76, 77, 78, 79, 80, 81, 82, 83, 84, 85, 86, 87, 88, 89, 90, 91, 92, 93, 94, 95, 96, 97, 98, 99, 100, 101, 102, 103, 104, 105, 106, 107, 108, 109, 110, 111, 112, 113, 114, 115, 116, 117, 577, 579, 581, 583, 585, 587, 589, 591, 593, 595, 597, 599, 601, 603, 605, 607, 609, 611, 613, 615, 617, 619, 621, 623, 625, or 627, a variant, derivative, orthologue, paralogue or homologue thereof, in which:

[0678] the amino acid at Mutated site 1 is Thr, and the amino acid at Mutated site 5 is Ile.

[0679] In another preferred embodiment, the mutated PPO comprises a sequence of SEQ ID NO: 1, 2, 3, 4, 5, 6, 7, 8, 9, 10, 11, 12, 13, 14, 15, 16, 17, 18, 19, 20, 21, 22, 23, 24, 25, 26, 27, 28, 29, 30, 31, 32, 33, 34, 35, 36, 37, 38, 39, 40, 41, 42, 43, 44, 45, 46, 47, 48, 49, 50, 51, 52, 53, 54, 55, 56, 57, 58, 59, 60, 61, 62, 63, 64, 65, 66, 67, 68, 69, 70, 71, 72, 73, 74, 75, 76, 77, 78, 79, 80, 81, 82, 83, 84, 85, 86, 87, 88, 89, 90, 91, 92, 93, 94, 95, 96, 97, 98, 99, 100, 101, 102, 103, 104, 105, 106, 107, 108, 109, 110, 111, 112, 113, 114, 115, 116, 117, 577, 579, 581, 583, 585, 587, 589, 591, 593, 595, 597, 599, 601, 603, 605, 607, 609, 611, 613, 615, 617, 619, 621, 623, 625, or 627, a variant, derivative, orthologue, paralogue or homologue thereof, in which:

[0680] the amino acid at Mutated site 1 is Thr, and the amino acid at Mutated site 5 is Met.

[0681] In another preferred embodiment, the mutated PPO comprises a sequence of SEQ ID NO: 1, 2, 3, 4, 5, 6, 7, 8, 9, 10, 11, 12, 13, 14, 15, 16, 17, 18, 19, 20, 21, 22, 23, 24, 25, 26, 27, 28, 29, 30, 31, 32, 33, 34, 35, 36, 37, 38, 39, 40, 41, 42, 43, 44, 45, 46, 47, 48, 49, 50, 51, 52, 53, 54, 55, 56, 57, 58, 59, 60, 61, 62, 63, 64, 65, 66, 67, 68, 69, 70, 71, 72, 73, 74, 75, 76, 77, 78, 79, 80, 81, 82, 83, 84, 85, 86, 87, 88, 89, 90, 91, 92, 93, 94, 95, 96, 97, 98, 99, 100, 101, 102, 103, 104, 105, 106, 107, 108, 109, 110, 111, 112, 113, 114, 115, 116, 117, 577, 579, 581, 583, 585, 587, 589, 591, 593, 595, 597, 599, 601, 603, 605, 607, 609, 611, 613, 615, 617, 619, 621, 623, 625, or 627, a variant, derivative, orthologue, paralogue or homologue thereof, in which:

[0682] the amino acid at Mutated site 1 is Gln, and the amino acid at Mutated site 5 is Ala.

[0683] In another preferred embodiment, the mutated PPO comprises a sequence of SEQ ID NO: 1, 2, 3, 4, 5, 6, 7, 8, 9, 10, 11, 12, 13, 14, 15, 16, 17, 18, 19, 20, 21, 22, 23, 24, 25, 26, 27, 28, 29, 30, 31, 32, 33, 34, 35, 36, 37, 38, 39, 40, 41, 42, 43, 44, 45, 46, 47, 48, 49, 50, 51, 52, 53, 54, 55, 56, 57, 58, 59, 60, 61, 62, 63, 64, 65, 66, 67, 68, 69, 70, 71, 72, 73, 74, 75, 76, 77, 78, 79, 80, 81, 82, 83, 84, 85, 86, 87, 88, 89, 90, 91, 92, 93, 94, 95, 96, 97, 98, 99, 100, 101, 102, 103, 104, 105, 106, 107, 108, 109, 110, 111, 112, 113, 114, 115, 116, 117, 577, 579, 581, 583, 585, 587, 589, 591, 593, 595, 597, 599, 601, 603, 605, 607, 609, 611, 613, 615, 617, 619, 621, 623, 625, or 627, a variant, derivative, orthologue, paralogue or homologue thereof, in which:

[0684] the amino acid at Mutated site 1 is Gln, and the amino acid at Mutated site 5 is Leu.

[0685] In another preferred embodiment, the mutated PPO comprises a sequence of SEQ ID NO: 1, 2, 3, 4, 5, 6, 7, 8, 9, 10, 11, 12, 13, 14, 15, 16, 17, 18, 19, 20, 21, 22, 23, 24, 25, 26, 27, 28, 29, 30, 31, 32, 33, 34, 35, 36, 37, 38, 39, 40, 41, 42, 43, 44, 45, 46, 47, 48, 49, 50, 51, 52, 53, 54, 55, 56, 57, 58, 59, 60, 61, 62, 63, 64, 65, 66, 67, 68, 69, 70, 71, 72, 73, 74, 75, 76, 77, 78, 79, 80, 81, 82, 83, 84, 85, 86, 87, 88, 89, 90, 91, 92, 93, 94, 95, 96, 97, 98, 99, 100, 101, 102, 103, 104, 105, 106, 107, 108, 109, 110, 111, 112, 113, 114, 115, 116, 117, 577, 579, 581, 583, 585, 587, 589, 591, 593, 595, 597, 599, 601, 603, 605, 607, 609, 611, 613, 615, 617, 619, 621, 623, 625, or 627, a variant, derivative, orthologue, paralogue or homologue thereof, in which:

[0686] the amino acid at Mutated site 1 is Gln, and the amino acid at Mutated site 5 is Val.

[0687] In another preferred embodiment, the mutated PPO comprises a sequence of SEQ ID NO: 1, 2, 3, 4, 5, 6, 7, 8, 9, 10, 11, 12, 13, 14, 15, 16, 17, 18, 19, 20, 21, 22, 23, 24, 25, 26, 27, 28, 29, 30, 31, 32, 33, 34, 35, 36, 37, 38, 39, 40, 41, 42, 43, 44, 45, 46, 47, 48, 49, 50, 51, 52, 53, 54, 55, 56, 57, 58, 59, 60, 61, 62, 63, 64, 65, 66, 67, 68, 69, 70, 71, 72, 73, 74, 75, 76, 77, 78, 79, 80, 81, 82, 83, 84, 85, 86, 87, 88, 89, 90, 91, 92, 93, 94, 95, 96, 97, 98, 99, 100, 101, 102, 103, 104, 105, 106, 107, 108, 109, 110, 111, 112, 113, 114, 115, 116, 117, 577, 579, 581, 583, 585, 587, 589, 591, 593, 595, 597, 599, 601, 603, 605, 607, 609, 611, 613, 615, 617, 619, 621, 623, 625, or 627, a variant, derivative, orthologue, paralogue or homologue thereof, in which:

[0688] the amino acid at Mutated site 1 is Gln, and the amino acid at Mutated site 5 is Ile.

[0689] In another preferred embodiment, the mutated PPO comprises a sequence of SEQ ID NO: 1, 2, 3, 4, 5, 6, 7, 8, 9, 10, 11, 12, 13, 14, 15, 16, 17, 18, 19, 20, 21, 22, 23, 24, 25, 26, 27, 28, 29, 30, 31, 32, 33, 34, 35, 36, 37, 38, 39, 40, 41, 42, 43, 44, 45, 46, 47, 48, 49, 50, 51, 52, 53, 54, 55, 56, 57, 58, 59, 60, 61, 62, 63, 64, 65, 66, 67, 68, 69, 70, 71, 72, 73, 74, 75, 76, 77, 78, 79, 80, 81, 82, 83, 84, 85, 86, 87, 88, 89, 90, 91, 92, 93, 94, 95, 96, 97, 98, 99, 100, 101, 102, 103, 104, 105, 106, 107, 108, 109, 110, 111, 112, 113, 114, 115, 116, 117, 577, 579, 581, 583, 585, 587, 589, 591, 593, 595, 597, 599, 601, 603, 605, 607, 609, 611, 613, 615, 617, 619, 621, 623, 625, or 627, a variant, derivative, orthologue, paralogue or homologue thereof, in which:

[0690] the amino acid at Mutated site 1 is Gln, and the amino acid at Mutated site 5 is Met.

[0691] In another preferred embodiment, the mutated PPO comprises a sequence of SEQ ID NO: 1, 2, 3, 4, 5, 6, 7, 8, 9, 10, 11, 12, 13, 14, 15, 16, 17, 18, 19, 20, 21, 22, 23, 24, 25, 26, 27, 28, 29, 30, 31, 32, 33, 34, 35, 36, 37, 38, 39, 40, 41, 42, 43, 44, 45, 46, 47, 48, 49, 50, 51, 52, 53, 54, 55, 56, 57, 58, 59, 60, 61, 62, 63, 64, 65, 66, 67, 68, 69, 70, 71, 72, 73, 74, 75, 76, 77, 78, 79, 80, 81, 82, 83, 84, 85, 86, 87, 88, 89, 90, 91, 92, 93, 94, 95, 96, 97, 98, 99, 100, 101, 102, 103, 104, 105, 106, 107, 108, 109, 110, 111, 112, 113, 114, 115, 116, 117, 577, 579, 581, 583, 585, 587, 589, 591, 593, 595, 597, 599, 601, 603, 605, 607, 609, 611, 613, 615, 617, 619, 621, 623, 625, or 627, a variant, derivative, orthologue, paralogue or homologue thereof, in which:

[0692] the amino acid at Mutated site 1 is His, and the amino acid at Mutated site 5 is Ala.

[0693] In another preferred embodiment, the mutated PPO comprises a sequence of SEQ ID NO: 1, 2, 3, 4, 5, 6, 7, 8, 9, 10, 11, 12, 13, 14, 15, 16, 17, 18, 19, 20, 21, 22, 23, 24, 25, 26, 27, 28, 29, 30, 31, 32, 33, 34, 35, 36, 37, 38, 39, 40, 41, 42, 43, 44, 45, 46, 47, 48, 49, 50, 51, 52, 53, 54, 55, 56, 57, 58, 59, 60, 61, 62, 63, 64, 65, 66, 67, 68, 69, 70, 71, 72, 73, 74, 75, 76, 77, 78, 79, 80, 81, 82, 83, 84, 85, 86, 87, 88, 89, 90, 91, 92, 93, 94, 95, 96, 97, 98, 99, 100, 101, 102, 103, 104, 105, 106, 107, 108, 109, 110, 111, 112, 113, 114, 115, 116, 117, 577, 579, 581, 583, 585, 587, 589, 591, 593, 595, 597, 599, 601, 603, 605, 607, 609, 611, 613, 615, 617, 619, 621, 623, 625, or 627, a variant, derivative, orthologue, paralogue or homologue thereof, in which:

[0694] the amino acid at Mutated site 1 is His, and the amino acid at Mutated site 5 is Leu.

[0695] In another preferred embodiment, the mutated PPO comprises a sequence of SEQ ID NO: 1, 2, 3, 4, 5, 6, 7, 8, 9, 10, 11, 12, 13, 14, 15, 16, 17, 18, 19, 20, 21, 22, 23, 24, 25, 26, 27, 28, 29, 30, 31, 32, 33, 34, 35, 36, 37, 38, 39, 40, 41, 42, 43, 44, 45, 46, 47, 48, 49, 50, 51, 52, 53, 54, 55, 56, 57, 58, 59, 60, 61, 62, 63, 64, 65, 66, 67, 68, 69, 70, 71, 72, 73, 74, 75, 76, 77, 78, 79, 80, 81, 82, 83, 84, 85, 86, 87, 88, 89, 90, 91, 92, 93, 94, 95, 96, 97, 98, 99, 100, 101, 102, 103, 104, 105, 106, 107, 108, 109, 110, 111, 112, 113, 114, 115, 116, 117, 577, 579, 581, 583, 585, 587, 589, 591, 593, 595, 597, 599, 601, 603, 605, 607, 609, 611, 613, 615, 617, 619, 621, 623, 625, or 627, a variant, derivative, orthologue, paralogue or homologue thereof, in which:

[0696] the amino acid at Mutated site 1 is His, and the amino acid at Mutated site 5 is Val.

[0697] In another preferred embodiment, the mutated PPO comprises a sequence of SEQ ID NO: 1, 2, 3, 4, 5, 6, 7, 8, 9, 10, 11, 12, 13, 14, 15, 16, 17, 18, 19, 20, 21, 22, 23, 24, 25, 26, 27, 28, 29, 30, 31, 32, 33, 34, 35, 36, 37, 38, 39, 40, 41, 42, 43, 44, 45, 46, 47, 48, 49, 50, 51, 52, 53, 54, 55, 56, 57, 58, 59, 60, 61, 62, 63, 64, 65, 66, 67, 68, 69, 70, 71, 72, 73, 74, 75, 76, 77, 78, 79, 80, 81, 82, 83, 84, 85, 86, 87, 88, 89, 90, 91, 92, 93, 94, 95, 96, 97, 98, 99, 100, 101, 102, 103, 104, 105, 106, 107, 108, 109, 110, 111, 112, 113, 114, 115, 116, 117, 577, 579, 581, 583, 585, 587, 589, 591, 593, 595, 597, 599, 601, 603, 605, 607, 609, 611, 613, 615, 617, 619, 621, 623, 625, or 627, a variant, derivative, orthologue, paralogue or homologue thereof, in which:

[0698] the amino acid at Mutated site 1 is His, and the amino acid at Mutated site 5 is Ile.

[0699] In another preferred embodiment, the mutated PPO comprises a sequence of SEQ ID NO: 1, 2, 3, 4, 5, 6, 7, 8, 9, 10, 11, 12, 13, 14, 15, 16, 17, 18, 19, 20, 21, 22, 23, 24, 25, 26, 27, 28, 29, 30, 31, 32, 33, 34, 35, 36, 37, 38, 39, 40, 41, 42, 43, 44, 45, 46, 47, 48, 49, 50, 51, 52, 53, 54, 55, 56, 57, 58, 59, 60, 61, 62, 63, 64, 65, 66, 67, 68, 69, 70, 71, 72, 73, 74, 75, 76, 77, 78, 79, 80, 81, 82, 83, 84, 85, 86, 87, 88, 89, 90, 91, 92, 93, 94, 95, 96, 97, 98, 99, 100, 101, 102, 103, 104, 105, 106, 107, 108, 109, 110, 111, 112, 113, 114, 115, 116, 117, 577, 579, 581, 583, 585, 587, 589, 591, 593, 595, 597, 599, 601, 603, 605, 607, 609, 611, 613, 615, 617, 619, 621, 623, 625, or 627, a variant, derivative, orthologue, paralogue or homologue thereof, in which:

[0700] the amino acid at Mutated site 1 is His, and the amino acid at Mutated site 5 is Met.

[0701] In another preferred embodiment, the mutated PPO refers to a polypeptide of SEQ ID NO: 1, 2, 3, 4, 5, 6, 7, 8, 9, 10, 11, 12, 13, 14, 15, 16, 17, 18, 19, 20, 21, 22, 23, 24, 25, 26, 27, 28, 29, 30, 31, 32, 33, 34, 35, 36, 37, 38, 39, 40, 41, 42, 43, 44, 45, 46, 47, 48, 49, 50, 51, 52, 53, 54, 55, 56, 57, 58, 59, 60, 61, 62, 63, 64, 65, 66, 67, 68, 69, 70, 71, 72, 73, 74, 75, 76, 77, 78, 79, 80, 81, 82, 83, 84, 85, 86, 87, 88, 89, 90, 91, 92, 93, 94, 95, 96, 97, 98, 99, 100, 101, 102, 103, 104, 105, 106, 107, 108, 109, 110, 111, 112, 113, 114, 115, 116, or 117, in which the amino acid sequence differs at Mutated site 4 (which corresponds to Leu397 of SEQ ID NO: 1) according to Table 2a, and/or at Mutated site 5 (which corresponds to Phe420 of SEQ ID NO: 1) according to Table 2a.

[0702] Examples of differences at these amino acid positions include, but are not limited to, one or more of the following:

[0703] the amino acid at Mutated site 4 is other than Leucine (or Alanine, or Serine, or Phenylalanine, as the case may be according to Table 2a);

[0704] the amino acid at Mutated site 5 is other than Phenylalanine (or Methionine, or Tyrosine, or Leucine, as the case may be according to Table 2a),

[0705] In particularly preferred embodiment, the mutated PPO comprises a sequence of SEQ ID NO: 1, 2, 3, 4, 5, 6, 7, 8, 9, 10, 11, 12, 13, 14, 15, 16, 17, 18, 19, 20, 21, 22, 23, 24, 25, 26, 27, 28, 29, 30, 31, 32, 33, 34, 35, 36, 37, 38, 39, 40, 41, 42, 43, 44, 45, 46, 47, 48, 49, 50, 51, 52, 53, 54, 55, 56, 57, 58, 59, 60, 61, 62, 63, 64, 65, 66, 67, 68, 69, 70, 71, 72, 73, 74, 75, 76, 77, 78, 79, 80, 81, 82, 83, 84, 85, 86, 87, 88, 89, 90, 91, 92, 93, 94, 95, 96, 97, 98, 99, 100, 101, 102, 103, 104, 105, 106, 107, 108, 109, 110, 111, 112, 113, 114, 115, 116, 117, 577, 579, 581, 583, 585, 587, 589, 591, 593, 595, 597, 599, 601, 603, 605, 607, 609, 611, 613, 615, 617, 619, 621, 623, 625, or 627, a variant, derivative, orthologue, paralogue or homologue thereof, in which:

[0706] the amino acid at Mutated site 4 (which corresponds to Leu397 of SEQ ID NO: 1) is Ala, Arg, Val, Ile, Met, His, Lys, Asp, Glu, Ser, Thr, Asn, Gln, Cys, Gly, Pro, Phe, Tyr, or Trp, and the amino acid at Mutated site 5 (which corresponds to Phe420 of SEQ ID NO: 1) is Ala, Leu, Val, Ile, Met, His, Lys, Asp, Glu, Ser, Thr, Asn, Gln, Cys, Gly, Pro, Arg, Tyr, or Trp.

[0707] In another preferred embodiment, the mutated PPO comprises a sequence of SEQ ID NO: 1, 2, 3, 4, 5, 6, 7, 8, 9, 10, 11, 12, 13, 14, 15, 16, 17, 18, 19, 20, 21, 22, 23, 24, 25, 26, 27, 28, 29, 30, 31, 32, 33, 34, 35, 36, 37, 38, 39, 40, 41, 42, 43, 44, 45, 46, 47, 48, 49, 50, 51, 52, 53, 54, 55, 56, 57, 58, 59, 60, 61, 62, 63, 64, 65, 66, 67, 68, 69, 70, 71, 72, 73, 74, 75, 76, 77, 78, 79, 80, 81, 82, 83, 84, 85, 86, 87, 88, 89, 90, 91, 92, 93, 94, 95, 96, 97, 98, 99, 100, 101, 102, 103, 104, 105, 106, 107, 108, 109, 110, 111, 112, 113, 114, 115, 116, 117, 577, 579, 581, 583, 585, 587, 589, 591, 593, 595, 597, 599, 601, 603, 605, 607, 609, 611, 613, 615, 617, 619, 621, 623, 625, or 627, a variant, derivative, orthologue, paralogue or homologue thereof, in which:

[0708] the amino acid at Mutated site 4 is Ala, and the amino acid at Mutated site 5 is Ala.

[0709] In another preferred embodiment, the mutated PPO comprises a sequence of SEQ ID NO: 1, 2, 3, 4, 5, 6, 7, 8, 9, 10, 11, 12, 13, 14, 15, 16, 17, 18, 19, 20, 21, 22, 23, 24, 25, 26, 27, 28, 29, 30, 31, 32, 33, 34, 35, 36, 37, 38, 39, 40, 41, 42, 43, 44, 45, 46, 47, 48, 49, 50, 51, 52, 53, 54, 55, 56, 57, 58, 59, 60, 61, 62, 63, 64, 65, 66, 67, 68, 69, 70, 71, 72, 73, 74, 75, 76, 77, 78, 79, 80, 81, 82, 83, 84, 85, 86, 87, 88, 89, 90, 91, 92, 93, 94, 95, 96, 97, 98, 99, 100, 101, 102, 103, 104, 105, 106, 107, 108, 109, 110, 111, 112, 113, 114, 115, 116, 117, 577, 579, 581, 583, 585, 587, 589, 591, 593, 595, 597, 599, 601, 603, 605, 607, 609, 611, 613, 615, 617, 619, 621, 623, 625, or 627, a variant, derivative, orthologue, paralogue or homologue thereof, in which:

[0710] the amino acid at Mutated site 4 is Ala, and the amino acid at Mutated site 5 is Leu.

[0711] In another preferred embodiment, the mutated PPO comprises a sequence of SEQ ID NO: 1, 2, 3, 4, 5, 6, 7, 8, 9, 10, 11, 12, 13, 14, 15, 16, 17, 18, 19, 20, 21, 22, 23, 24, 25, 26, 27, 28, 29, 30, 31, 32, 33, 34, 35, 36, 37, 38, 39, 40, 41, 42, 43, 44, 45, 46, 47, 48, 49, 50, 51, 52, 53, 54, 55, 56, 57, 58, 59, 60, 61, 62, 63, 64, 65, 66, 67, 68, 69, 70, 71, 72, 73, 74, 75, 76, 77, 78, 79, 80, 81, 82, 83, 84, 85, 86, 87, 88, 89, 90, 91, 92, 93, 94, 95, 96, 97, 98, 99, 100, 101, 102, 103, 104, 105, 106, 107, 108, 109, 110, 111, 112, 113, 114, 115, 116, 117, 577, 579, 581, 583, 585, 587, 589, 591, 593, 595, 597, 599, 601, 603, 605, 607, 609, 611, 613, 615, 617, 619, 621, 623, 625, or 627, a variant, derivative, orthologue, paralogue or homologue thereof, in which:

[0712] the amino acid at Mutated site 4 is Ala, and the amino acid at Mutated site 5 is Val.

[0713] In another preferred embodiment, the mutated PPO comprises a sequence of SEQ ID NO: 1, 2, 3, 4, 5, 6, 7, 8, 9, 10, 11, 12, 13, 14, 15, 16, 17, 18, 19, 20, 21, 22, 23, 24, 25, 26, 27, 28, 29, 30, 31, 32, 33, 34, 35, 36, 37, 38, 39, 40, 41, 42, 43, 44, 45, 46, 47, 48, 49, 50, 51, 52, 53, 54, 55, 56, 57, 58, 59, 60, 61, 62, 63, 64, 65, 66, 67, 68, 69, 70, 71, 72, 73, 74, 75, 76, 77, 78, 79, 80, 81, 82, 83, 84, 85, 86, 87, 88, 89, 90, 91, 92, 93, 94, 95, 96, 97, 98, 99, 100, 101, 102, 103, 104, 105, 106, 107, 108, 109, 110, 111, 112, 113, 114, 115, 116, 117, 577, 579, 581, 583, 585, 587, 589, 591, 593, 595, 597, 599, 601, 603, 605, 607, 609, 611, 613, 615, 617, 619, 621, 623, 625, or 627, a variant, derivative, orthologue, paralogue or homologue thereof, in which:

[0714] the amino acid at Mutated site 4 is Ala, and the amino acid at Mutated site 5 is Ile.

[0715] In another preferred embodiment, the mutated PPO comprises a sequence of SEQ ID NO: 1, 2, 3, 4, 5, 6, 7, 8, 9, 10, 11, 12, 13, 14, 15, 16, 17, 18, 19, 20, 21, 22, 23, 24, 25, 26, 27, 28, 29, 30, 31, 32, 33, 34, 35, 36, 37, 38, 39, 40, 41, 42, 43, 44, 45, 46, 47, 48, 49, 50, 51, 52, 53, 54, 55, 56, 57, 58, 59, 60, 61, 62, 63, 64, 65, 66, 67, 68, 69, 70, 71, 72, 73, 74, 75, 76, 77, 78, 79, 80, 81, 82, 83, 84, 85, 86, 87, 88, 89, 90, 91, 92, 93, 94, 95, 96, 97, 98, 99, 100, 101, 102, 103, 104, 105, 106, 107, 108, 109, 110, 111, 112, 113, 114, 115, 116, 117, 577, 579, 581, 583, 585, 587, 589, 591, 593, 595, 597, 599, 601, 603, 605, 607, 609, 611, 613, 615, 617, 619, 621, 623, 625, or 627, a variant, derivative, orthologue, paralogue or homologue thereof, in which:

[0716] the amino acid at Mutated site 4 is Ala, and the amino acid at Mutated site 5 is Met.

[0717] In another preferred embodiment, the mutated PPO comprises a sequence of SEQ ID NO: 1, 2, 3, 4, 5, 6, 7, 8, 9, 10, 11, 12, 13, 14, 15, 16, 17, 18, 19, 20, 21, 22, 23, 24, 25, 26, 27, 28, 29, 30, 31, 32, 33, 34, 35, 36, 37, 38, 39, 40, 41, 42, 43, 44, 45, 46, 47, 48, 49, 50, 51, 52, 53, 54, 55, 56, 57, 58, 59, 60, 61, 62, 63, 64, 65, 66, 67, 68, 69, 70, 71, 72, 73, 74, 75, 76, 77, 78, 79, 80, 81, 82, 83, 84, 85, 86, 87, 88, 89, 90, 91, 92, 93, 94, 95, 96, 97, 98, 99, 100, 101, 102, 103, 104, 105, 106, 107, 108, 109, 110, 111, 112, 113, 114, 115, 116, 117, 577, 579, 581, 583, 585, 587, 589, 591, 593, 595, 597, 599, 601, 603, 605, 607, 609, 611, 613, 615, 617, 619, 621, 623, 625, or 627, a variant, derivative, orthologue, paralogue or homologue thereof, in which:

[0718] the amino acid at Mutated site 4 is Ala, and the amino acid at Mutated site 5 is His.

[0719] In another preferred embodiment, the mutated PPO comprises a sequence of SEQ ID NO: 1, 2, 3, 4, 5, 6, 7, 8, 9, 10, 11, 12, 13, 14, 15, 16, 17, 18, 19, 20, 21, 22, 23, 24, 25, 26, 27, 28, 29, 30, 31, 32, 33, 34, 35, 36, 37, 38, 39, 40, 41, 42, 43, 44, 45, 46, 47, 48, 49, 50, 51, 52, 53, 54, 55, 56, 57, 58, 59, 60, 61, 62, 63, 64, 65, 66, 67, 68, 69, 70, 71, 72, 73, 74, 75, 76, 77, 78, 79, 80, 81, 82, 83, 84, 85, 86, 87, 88, 89, 90, 91, 92, 93, 94, 95, 96, 97, 98, 99, 100, 101, 102, 103, 104, 105, 106, 107, 108, 109, 110, 111, 112, 113, 114, 115, 116, 117, 577, 579, 581, 583, 585, 587, 589, 591, 593, 595, 597, 599, 601, 603, 605, 607, 609, 611, 613, 615, 617, 619, 621, 623, 625, or 627, a variant, derivative, orthologue, paralogue or homologue thereof, in which:

[0720] the amino acid at Mutated site 4 is Ala, and the amino acid at Mutated site 5 is Lys.

[0721] In another preferred embodiment, the mutated PPO comprises a sequence of SEQ ID NO: 1, 2, 3, 4, 5, 6, 7, 8, 9, 10, 11, 12, 13, 14, 15, 16, 17, 18, 19, 20, 21, 22, 23, 24, 25, 26, 27, 28, 29, 30, 31, 32, 33, 34, 35, 36, 37, 38, 39, 40, 41, 42, 43, 44, 45, 46, 47, 48, 49, 50, 51, 52, 53, 54, 55, 56, 57, 58, 59, 60, 61, 62, 63, 64, 65, 66, 67, 68, 69, 70, 71, 72, 73, 74, 75, 76, 77, 78, 79, 80, 81, 82, 83, 84, 85, 86, 87, 88, 89, 90, 91, 92, 93, 94, 95, 96, 97, 98, 99, 100, 101, 102, 103, 104, 105, 106, 107, 108, 109, 110, 111, 112, 113, 114, 115, 116, 117, 577, 579, 581, 583, 585, 587, 589, 591, 593, 595, 597, 599, 601, 603, 605, 607, 609, 611, 613, 615, 617, 619, 621, 623, 625, or 627, a variant, derivative, orthologue, paralogue or homologue thereof, in which:

[0722] the amino acid at Mutated site 4 is Ala, and the amino acid at Mutated site 5 is Asp.

[0723] In another preferred embodiment, the mutated PPO comprises a sequence of SEQ ID NO: 1, 2, 3, 4, 5, 6, 7, 8, 9, 10, 11, 12, 13, 14, 15, 16, 17, 18, 19, 20, 21, 22, 23, 24, 25, 26, 27, 28, 29, 30, 31, 32, 33, 34, 35, 36, 37, 38, 39, 40, 41, 42, 43, 44, 45, 46, 47, 48, 49, 50, 51, 52, 53, 54, 55, 56, 57, 58, 59, 60, 61, 62, 63, 64, 65, 66, 67, 68, 69, 70, 71, 72, 73, 74, 75, 76, 77, 78, 79, 80, 81, 82, 83, 84, 85, 86, 87, 88, 89, 90, 91, 92, 93, 94, 95, 96, 97, 98, 99, 100, 101, 102, 103, 104, 105, 106, 107, 108, 109, 110, 111, 112, 113, 114, 115, 116, 117, 577, 579, 581, 583, 585, 587, 589, 591, 593, 595, 597, 599, 601, 603, 605, 607, 609, 611, 613, 615, 617, 619, 621, 623, 625, or 627, a variant, derivative, orthologue, paralogue or homologue thereof, in which:

[0724] the amino acid at Mutated site 4 is Ala, and the amino acid at Mutated site 5 is Glu.

[0725] In another preferred embodiment, the mutated PPO comprises a sequence of SEQ ID NO: 1, 2, 3, 4, 5, 6, 7, 8, 9, 10, 11, 12, 13, 14, 15, 16, 17, 18, 19, 20, 21, 22, 23, 24, 25, 26, 27, 28, 29, 30, 31, 32, 33, 34, 35, 36, 37, 38, 39, 40, 41, 42, 43, 44, 45, 46, 47, 48, 49, 50, 51, 52, 53, 54, 55, 56, 57, 58, 59, 60, 61, 62, 63, 64, 65, 66, 67, 68, 69, 70, 71, 72, 73, 74, 75, 76, 77, 78, 79, 80, 81, 82, 83, 84, 85, 86, 87, 88, 89, 90, 91, 92, 93, 94, 95, 96, 97, 98, 99, 100, 101, 102, 103, 104, 105, 106, 107, 108, 109, 110, 111, 112, 113, 114, 115, 116, 117, 577, 579, 581, 583, 585, 587, 589, 591, 593, 595, 597, 599, 601, 603, 605, 607, 609, 611, 613, 615, 617, 619, 621, 623, 625, or 627, a variant, derivative, orthologue, paralogue or homologue thereof, in which:

[0726] the amino acid at Mutated site 4 is Ala, and the amino acid at Mutated site 5 is Ser.

[0727] In another preferred embodiment, the mutated PPO comprises a sequence of SEQ ID NO: 1, 2, 3, 4, 5, 6, 7, 8, 9, 10, 11, 12, 13, 14, 15, 16, 17, 18, 19, 20, 21, 22, 23, 24, 25, 26, 27, 28, 29, 30, 31, 32, 33, 34, 35, 36, 37, 38, 39, 40, 41, 42, 43, 44, 45, 46, 47, 48, 49, 50, 51, 52, 53, 54, 55, 56, 57, 58, 59, 60, 61, 62, 63, 64, 65, 66, 67, 68, 69, 70, 71, 72, 73, 74, 75, 76, 77, 78, 79, 80, 81, 82, 83, 84, 85, 86, 87, 88, 89, 90, 91, 92, 93, 94, 95, 96, 97, 98, 99, 100, 101, 102, 103, 104, 105, 106, 107, 108, 109, 110, 111, 112, 113, 114, 115, 116, 117, 577, 579, 581, 583, 585, 587, 589, 591, 593, 595, 597, 599, 601, 603, 605, 607, 609, 611, 613, 615, 617, 619, 621, 623, 625, or 627, a variant, derivative, orthologue, paralogue or homologue thereof, in which:

[0728] the amino acid at Mutated site 4 is Ala, and the amino acid at Mutated site 5 is Thr.

[0729] In another preferred embodiment, the mutated PPO comprises a sequence of SEQ ID NO: 1, 2, 3, 4, 5, 6, 7, 8, 9, 10, 11, 12, 13, 14, 15, 16, 17, 18, 19, 20, 21, 22, 23, 24, 25, 26, 27, 28, 29, 30, 31, 32, 33, 34, 35, 36, 37, 38, 39, 40, 41, 42, 43, 44, 45, 46, 47, 48, 49, 50, 51, 52, 53, 54, 55, 56, 57, 58, 59, 60, 61, 62, 63, 64, 65, 66, 67, 68, 69, 70, 71, 72, 73, 74, 75, 76, 77, 78, 79, 80, 81, 82, 83, 84, 85, 86, 87, 88, 89, 90, 91, 92, 93, 94, 95, 96, 97, 98, 99, 100, 101, 102, 103, 104, 105, 106, 107, 108, 109, 110, 111, 112, 113, 114, 115, 116, 117, 577, 579, 581, 583, 585, 587, 589, 591, 593, 595, 597, 599, 601, 603, 605, 607, 609, 611, 613, 615, 617, 619, 621, 623, 625, or 627, a variant, derivative, orthologue, paralogue or homologue thereof, in which:

[0730] the amino acid at Mutated site 4 is Ala, and the amino acid at Mutated site 5 is Asn.

[0731] In another preferred embodiment, the mutated PPO comprises a sequence of SEQ ID NO: 1, 2, 3, 4, 5, 6, 7, 8, 9, 10, 11, 12, 13, 14, 15, 16, 17, 18, 19, 20, 21, 22, 23, 24, 25, 26, 27, 28, 29, 30, 31, 32, 33, 34, 35, 36, 37, 38, 39, 40, 41, 42, 43, 44, 45, 46, 47, 48, 49, 50, 51, 52, 53, 54, 55, 56, 57, 58, 59, 60, 61, 62, 63, 64, 65, 66, 67, 68, 69, 70, 71, 72, 73, 74, 75, 76, 77, 78, 79, 80, 81, 82, 83, 84, 85, 86, 87, 88, 89, 90, 91, 92, 93, 94, 95, 96, 97, 98, 99, 100, 101, 102, 103, 104, 105, 106, 107, 108, 109, 110, 111, 112, 113, 114, 115, 116, 117, 577, 579, 581, 583, 585, 587, 589, 591, 593, 595, 597, 599, 601, 603, 605, 607, 609, 611, 613, 615, 617, 619, 621, 623, 625, or 627, a variant, derivative, orthologue, paralogue or homologue thereof, in which:

[0732] the amino acid at Mutated site 4 is Ala, and the amino acid at Mutated site 5 is Gln.

[0733] In another preferred embodiment, the mutated PPO comprises a sequence of SEQ ID NO: 1, 2, 3, 4, 5, 6, 7, 8, 9, 10, 11, 12, 13, 14, 15, 16, 17, 18, 19, 20, 21, 22, 23, 24, 25, 26, 27, 28, 29, 30, 31, 32, 33, 34, 35, 36, 37, 38, 39, 40, 41, 42, 43, 44, 45, 46, 47, 48, 49, 50, 51, 52, 53, 54, 55, 56, 57, 58, 59, 60, 61, 62, 63, 64, 65, 66, 67, 68, 69, 70, 71, 72, 73, 74, 75, 76, 77, 78, 79, 80, 81, 82, 83, 84, 85, 86, 87, 88, 89, 90, 91, 92, 93, 94, 95, 96, 97, 98, 99, 100, 101, 102, 103, 104, 105, 106, 107, 108, 109, 110, 111, 112, 113, 114, 115, 116, 117, 577, 579, 581, 583, 585, 587, 589, 591, 593, 595, 597, 599, 601, 603, 605, 607, 609, 611, 613, 615, 617, 619, 621, 623, 625, or 627, a variant, derivative, orthologue, paralogue or homologue thereof, in which:

[0734] the amino acid at Mutated site 4 is Ala, and the amino acid at Mutated site 5 is Cys.

[0735] In another preferred embodiment, the mutated PPO comprises a sequence of SEQ ID NO: 1, 2, 3, 4, 5, 6, 7, 8, 9, 10, 11, 12, 13, 14, 15, 16, 17, 18, 19, 20, 21, 22, 23, 24, 25, 26, 27, 28, 29, 30, 31, 32, 33, 34, 35, 36, 37, 38, 39, 40, 41, 42, 43, 44, 45, 46, 47, 48, 49, 50, 51, 52, 53, 54, 55, 56, 57, 58, 59, 60, 61, 62, 63, 64, 65, 66, 67, 68, 69, 70, 71, 72, 73, 74, 75, 76, 77, 78, 79, 80, 81, 82, 83, 84, 85, 86, 87, 88, 89, 90, 91, 92, 93, 94, 95, 96, 97, 98, 99, 100, 101, 102, 103, 104, 105, 106, 107, 108, 109, 110, 111, 112, 113, 114, 115, 116, 117, 577, 579, 581, 583, 585, 587, 589, 591, 593, 595, 597, 599, 601, 603, 605, 607, 609, 611, 613, 615, 617, 619, 621, 623, 625, or 627, a variant, derivative, orthologue, paralogue or homologue thereof, in which:

[0736] the amino acid at Mutated site 4 is Ala, and the amino acid at Mutated site 5 is Gly.

[0737] In another preferred embodiment, the mutated PPO comprises a sequence of SEQ ID NO: 1, 2, 3, 4, 5, 6, 7, 8, 9, 10, 11, 12, 13, 14, 15, 16, 17, 18, 19, 20, 21, 22, 23, 24, 25, 26, 27, 28, 29, 30, 31, 32, 33, 34, 35, 36, 37, 38, 39, 40, 41, 42, 43, 44, 45, 46, 47, 48, 49, 50, 51, 52, 53, 54, 55, 56, 57, 58, 59, 60, 61, 62, 63, 64, 65, 66, 67, 68, 69, 70, 71, 72, 73, 74, 75, 76, 77, 78, 79, 80, 81, 82, 83, 84, 85, 86, 87, 88, 89, 90, 91, 92, 93, 94, 95, 96, 97, 98, 99, 100, 101, 102, 103, 104, 105, 106, 107, 108, 109, 110, 111, 112, 113, 114, 115, 116, 117, 577, 579, 581, 583, 585, 587, 589, 591, 593, 595, 597, 599, 601, 603, 605, 607, 609, 611, 613, 615, 617, 619, 621, 623, 625, or 627, a variant, derivative, orthologue, paralogue or homologue thereof, in which:

[0738] the amino acid at Mutated site 4 is Ala, and the amino acid at Mutated site 5 is Pro.

[0739] In another preferred embodiment, the mutated PPO comprises a sequence of SEQ ID NO: 1, 2, 3, 4, 5, 6, 7, 8, 9, 10, 11, 12, 13, 14, 15, 16, 17, 18, 19, 20, 21, 22, 23, 24, 25, 26, 27, 28, 29, 30, 31, 32, 33, 34, 35, 36, 37, 38, 39, 40, 41, 42, 43, 44, 45, 46, 47, 48, 49, 50, 51, 52, 53, 54, 55, 56, 57, 58, 59, 60, 61, 62, 63, 64, 65, 66, 67, 68, 69, 70, 71, 72, 73, 74, 75, 76, 77, 78, 79, 80, 81, 82, 83, 84, 85, 86, 87, 88, 89, 90, 91, 92, 93, 94, 95, 96, 97, 98, 99, 100, 101, 102, 103, 104, 105, 106, 107, 108, 109, 110, 111, 112, 113, 114, 115, 116, 117, 577, 579, 581, 583, 585, 587, 589, 591, 593, 595, 597, 599, 601, 603, 605, 607, 609, 611, 613, 615, 617, 619, 621, 623, 625, or 627, a variant, derivative, orthologue, paralogue or homologue thereof, in which:

[0740] the amino acid at Mutated site 4 is Ala, and the amino acid at Mutated site 5 is Arg.

[0741] In another preferred embodiment, the mutated PPO comprises a sequence of SEQ ID NO: 1, 2, 3, 4, 5, 6, 7, 8, 9, 10, 11, 12, 13, 14, 15, 16, 17, 18, 19, 20, 21, 22, 23, 24, 25, 26, 27, 28, 29, 30, 31, 32, 33, 34, 35, 36, 37, 38, 39, 40, 41, 42, 43, 44, 45, 46, 47, 48, 49, 50, 51, 52, 53, 54, 55, 56, 57, 58, 59, 60, 61, 62, 63, 64, 65, 66, 67, 68, 69, 70, 71, 72, 73, 74, 75, 76, 77, 78, 79, 80, 81, 82, 83, 84, 85, 86, 87, 88, 89, 90, 91, 92, 93, 94, 95, 96, 97, 98, 99, 100, 101, 102, 103, 104, 105, 106, 107, 108, 109, 110, 111, 112, 113, 114, 115, 116, 117, 577, 579, 581, 583, 585, 587, 589, 591, 593, 595, 597, 599, 601, 603, 605, 607, 609, 611, 613, 615, 617, 619, 621, 623, 625, or 627, a variant, derivative, orthologue, paralogue or homologue thereof, in which:

[0742] the amino acid at Mutated site 4 is Ala, and the amino acid at Mutated site 5 is Tyr.

[0743] In another preferred embodiment, the mutated PPO comprises a sequence of SEQ ID NO: 1, 2, 3, 4, 5, 6, 7, 8, 9, 10, 11, 12, 13, 14, 15, 16, 17, 18, 19, 20, 21, 22, 23, 24, 25, 26, 27, 28, 29, 30, 31, 32, 33, 34, 35, 36, 37, 38, 39, 40, 41, 42, 43, 44, 45, 46, 47, 48, 49, 50, 51, 52, 53, 54, 55, 56, 57, 58, 59, 60, 61, 62, 63, 64, 65, 66, 67, 68, 69, 70, 71, 72, 73, 74, 75, 76, 77, 78, 79, 80, 81, 82, 83, 84, 85, 86, 87, 88, 89, 90, 91, 92, 93, 94, 95, 96, 97, 98, 99, 100, 101, 102, 103, 104, 105, 106, 107, 108, 109, 110, 111, 112, 113, 114, 115, 116, 117, 577, 579, 581, 583, 585, 587, 589, 591, 593, 595, 597, 599, 601, 603, 605, 607, 609, 611, 613, 615, 617, 619, 621, 623, 625, or 627, a variant, derivative, orthologue, paralogue or homologue thereof, in which:

[0744] the amino acid at Mutated site 4 is Ala, and the amino acid at Mutated site 5 is Trp.

[0745] In another preferred embodiment, the mutated PPO comprises a sequence of SEQ ID NO: 1, 2, 3, 4, 5, 6, 7, 8, 9, 10, 11, 12, 13, 14, 15, 16, 17, 18, 19, 20, 21, 22, 23, 24, 25, 26, 27, 28, 29, 30, 31, 32, 33, 34, 35, 36, 37, 38, 39, 40, 41, 42, 43, 44, 45, 46, 47, 48, 49, 50, 51, 52, 53, 54, 55, 56, 57, 58, 59, 60, 61, 62, 63, 64, 65, 66, 67, 68, 69, 70, 71, 72, 73, 74, 75, 76, 77, 78, 79, 80, 81, 82, 83, 84, 85, 86, 87, 88, 89, 90, 91, 92, 93, 94, 95, 96, 97, 98, 99, 100, 101, 102, 103, 104, 105, 106, 107, 108, 109, 110, 111, 112, 113, 114, 115, 116, 117, 577, 579, 581, 583, 585, 587, 589, 591, 593, 595, 597, 599, 601, 603, 605, 607, 609, 611, 613, 615, 617, 619, 621, 623, 625, or 627, a variant, derivative, orthologue, paralogue or homologue thereof, in which:

[0746] the amino acid at Mutated site 4 is Arg, and the amino acid at Mutated site 5 is Ala.

[0747] In another preferred embodiment, the mutated PPO comprises a sequence of SEQ ID NO: 1, 2, 3, 4, 5, 6, 7, 8, 9, 10, 11, 12, 13, 14, 15, 16, 17, 18, 19, 20, 21, 22, 23, 24, 25, 26, 27, 28, 29, 30, 31, 32, 33, 34, 35, 36, 37, 38, 39, 40, 41, 42, 43, 44, 45, 46, 47, 48, 49, 50, 51, 52, 53, 54, 55, 56, 57, 58, 59, 60, 61, 62, 63, 64, 65, 66, 67, 68, 69, 70, 71, 72, 73, 74, 75, 76, 77, 78, 79, 80, 81, 82, 83, 84, 85, 86, 87, 88, 89, 90, 91, 92, 93, 94, 95, 96, 97, 98, 99, 100, 101, 102, 103, 104, 105, 106, 107, 108, 109, 110, 111, 112, 113, 114, 115, 116, 117, 577, 579, 581, 583, 585, 587, 589, 591, 593, 595, 597, 599, 601, 603, 605, 607, 609, 611, 613, 615, 617, 619, 621, 623, 625, or 627, a variant, derivative, orthologue, paralogue or homologue thereof, in which:

[0748] the amino acid at Mutated site 4 is Arg, and the amino acid at Mutated site 5 is Leu.

[0749] In another preferred embodiment, the mutated PPO comprises a sequence of SEQ ID NO: 1, 2, 3, 4, 5, 6, 7, 8, 9, 10, 11, 12, 13, 14, 15, 16, 17, 18, 19, 20, 21, 22, 23, 24, 25, 26, 27, 28, 29, 30, 31, 32, 33, 34, 35, 36, 37, 38, 39, 40, 41, 42, 43, 44, 45, 46, 47, 48, 49, 50, 51, 52, 53, 54, 55, 56, 57, 58, 59, 60, 61, 62, 63, 64, 65, 66, 67, 68, 69, 70, 71, 72, 73, 74, 75, 76, 77, 78, 79, 80, 81, 82, 83, 84, 85, 86, 87, 88, 89, 90, 91, 92, 93, 94, 95, 96, 97, 98, 99, 100, 101, 102, 103, 104, 105, 106, 107, 108, 109, 110, 111, 112, 113, 114, 115, 116, 117, 577, 579, 581, 583, 585, 587, 589, 591, 593, 595, 597, 599, 601, 603, 605, 607, 609, 611, 613, 615, 617, 619, 621, 623, 625, or 627, a variant, derivative, orthologue, paralogue or homologue thereof, in which:

[0750] the amino acid at Mutated site 4 is Arg, and the amino acid at Mutated site 5 is Val.

[0751] In another preferred embodiment, the mutated PPO comprises a sequence of SEQ ID NO: 1, 2, 3, 4, 5, 6, 7, 8, 9, 10, 11, 12, 13, 14, 15, 16, 17, 18, 19, 20, 21, 22, 23, 24, 25, 26, 27, 28, 29, 30, 31, 32, 33, 34, 35, 36, 37, 38, 39, 40, 41, 42, 43, 44, 45, 46, 47, 48, 49, 50, 51, 52, 53, 54, 55, 56, 57, 58, 59, 60, 61, 62, 63, 64, 65, 66, 67, 68, 69, 70, 71, 72, 73, 74, 75, 76, 77, 78, 79, 80, 81, 82, 83, 84, 85, 86, 87, 88, 89, 90, 91, 92, 93, 94, 95, 96, 97, 98, 99, 100, 101, 102, 103, 104, 105, 106, 107, 108, 109, 110, 111, 112, 113, 114, 115, 116, 117, 577, 579, 581, 583, 585, 587, 589, 591, 593, 595, 597, 599, 601, 603, 605, 607, 609, 611, 613, 615, 617, 619, 621, 623, 625, or 627, a variant, derivative, orthologue, paralogue or homologue thereof, in which:

[0752] the amino acid at Mutated site 4 is Arg, and the amino acid at Mutated site 5 is Ile.

[0753] In another preferred embodiment, the mutated PPO comprises a sequence of SEQ ID NO: 1, 2, 3, 4, 5, 6, 7, 8, 9, 10, 11, 12, 13, 14, 15, 16, 17, 18, 19, 20, 21, 22, 23, 24, 25, 26, 27, 28, 29, 30, 31, 32, 33, 34, 35, 36, 37, 38, 39, 40, 41, 42, 43, 44, 45, 46, 47, 48, 49, 50, 51, 52, 53, 54, 55, 56, 57, 58, 59, 60, 61, 62, 63, 64, 65, 66, 67, 68, 69, 70, 71, 72, 73, 74, 75, 76, 77, 78, 79, 80, 81, 82, 83, 84, 85, 86, 87, 88, 89, 90, 91, 92, 93, 94, 95, 96, 97, 98, 99, 100, 101, 102, 103, 104, 105, 106, 107, 108, 109, 110, 111, 112, 113, 114, 115, 116, 117, 577, 579, 581, 583, 585, 587, 589, 591, 593, 595, 597, 599, 601, 603, 605, 607, 609, 611, 613, 615, 617, 619, 621, 623, 625, or 627, a variant, derivative, orthologue, paralogue or homologue thereof, in which:

[0754] the amino acid at Mutated site 4 is Arg, and the amino acid at Mutated site 5 is Met.

[0755] In another preferred embodiment, the mutated PPO comprises a sequence of SEQ ID NO: 1, 2, 3, 4, 5, 6, 7, 8, 9, 10, 11, 12, 13, 14, 15, 16, 17, 18, 19, 20, 21, 22, 23, 24, 25, 26, 27, 28, 29, 30, 31, 32, 33, 34, 35, 36, 37, 38, 39, 40, 41, 42, 43, 44, 45, 46, 47, 48, 49, 50, 51, 52, 53, 54, 55, 56, 57, 58, 59, 60, 61, 62, 63, 64, 65, 66, 67, 68, 69, 70, 71, 72, 73, 74, 75, 76, 77, 78, 79, 80, 81, 82, 83, 84, 85, 86, 87, 88, 89, 90, 91, 92, 93, 94, 95, 96, 97, 98, 99, 100, 101, 102, 103, 104, 105, 106, 107, 108, 109, 110, 111, 112, 113, 114, 115, 116, 117, 577, 579, 581, 583, 585, 587, 589, 591, 593, 595, 597, 599, 601, 603, 605, 607, 609, 611, 613, 615, 617, 619, 621, 623, 625, or 627, a variant, derivative, orthologue, paralogue or homologue thereof, in which:

[0756] the amino acid at Mutated site 4 is Arg, and the amino acid at Mutated site 5 is His.

[0757] In another preferred embodiment, the mutated PPO comprises a sequence of SEQ ID NO: 1, 2, 3, 4, 5, 6, 7, 8, 9, 10, 11, 12, 13, 14, 15, 16, 17, 18, 19, 20, 21, 22, 23, 24, 25, 26, 27, 28, 29, 30, 31, 32, 33, 34, 35, 36, 37, 38, 39, 40, 41, 42, 43, 44, 45, 46, 47, 48, 49, 50, 51, 52, 53, 54, 55, 56, 57, 58, 59, 60, 61, 62, 63, 64, 65, 66, 67, 68, 69, 70, 71, 72, 73, 74, 75, 76, 77, 78, 79, 80, 81, 82, 83, 84, 85, 86, 87, 88, 89, 90, 91, 92, 93, 94, 95, 96, 97, 98, 99, 100, 101, 102, 103, 104, 105, 106, 107, 108, 109, 110, 111, 112, 113, 114, 115, 116, 117, 577, 579, 581, 583, 585, 587, 589, 591, 593, 595, 597, 599, 601, 603, 605, 607, 609, 611, 613, 615, 617, 619, 621, 623, 625, or 627, a variant, derivative, orthologue, paralogue or homologue thereof, in which:

[0758] the amino acid at Mutated site 4 is Arg, and the amino acid at Mutated site 5 is Lys.

[0759] In another preferred embodiment, the mutated PPO comprises a sequence of SEQ ID NO: 1, 2, 3, 4, 5, 6, 7, 8, 9, 10, 11, 12, 13, 14, 15, 16, 17, 18, 19, 20, 21, 22, 23, 24, 25, 26, 27, 28, 29, 30, 31, 32, 33, 34, 35, 36, 37, 38, 39, 40, 41, 42, 43, 44, 45, 46, 47, 48, 49, 50, 51, 52, 53, 54, 55, 56, 57, 58, 59, 60, 61, 62, 63, 64, 65, 66, 67, 68, 69, 70, 71, 72, 73, 74, 75, 76, 77, 78, 79, 80, 81, 82, 83, 84, 85, 86, 87, 88, 89, 90, 91, 92, 93, 94, 95, 96, 97, 98, 99, 100, 101, 102, 103, 104, 105, 106, 107, 108, 109, 110, 111, 112, 113, 114, 115, 116, 117, 577, 579, 581, 583, 585, 587, 589, 591, 593, 595, 597, 599, 601, 603, 605, 607, 609, 611, 613, 615, 617, 619, 621, 623, 625, or 627, a variant, derivative, orthologue, paralogue or homologue thereof, in which:

[0760] the amino acid at Mutated site 4 is Arg, and the amino acid at Mutated site 5 is Asp.

[0761] In another preferred embodiment, the mutated PPO comprises a sequence of SEQ ID NO: 1, 2, 3, 4, 5, 6, 7, 8, 9, 10, 11, 12, 13, 14, 15, 16, 17, 18, 19, 20, 21, 22, 23, 24, 25, 26, 27, 28, 29, 30, 31, 32, 33, 34, 35, 36, 37, 38, 39, 40, 41, 42, 43, 44, 45, 46, 47, 48, 49, 50, 51, 52, 53, 54, 55, 56, 57, 58, 59, 60, 61, 62, 63, 64, 65, 66, 67, 68, 69, 70, 71, 72, 73, 74, 75, 76, 77, 78, 79, 80, 81, 82, 83, 84, 85, 86, 87, 88, 89, 90, 91, 92, 93, 94, 95, 96, 97, 98, 99, 100, 101, 102, 103, 104, 105, 106, 107, 108, 109, 110, 111, 112, 113, 114, 115, 116, 117, 577, 579, 581, 583, 585, 587, 589, 591, 593, 595, 597, 599, 601, 603, 605, 607, 609, 611, 613, 615, 617, 619, 621, 623, 625, or 627, a variant, derivative, orthologue, paralogue or homologue thereof, in which:

[0762] the amino acid at Mutated site 4 is Arg, and the amino acid at Mutated site 5 is Glu.

[0763] In another preferred embodiment, the mutated PPO comprises a sequence of SEQ ID NO: 1, 2, 3, 4, 5, 6, 7, 8, 9, 10, 11, 12, 13, 14, 15, 16, 17, 18, 19, 20, 21, 22, 23, 24, 25, 26, 27, 28, 29, 30, 31, 32, 33, 34, 35, 36, 37, 38, 39, 40, 41, 42, 43, 44, 45, 46, 47, 48, 49, 50, 51, 52, 53, 54, 55, 56, 57, 58, 59, 60, 61, 62, 63, 64, 65, 66, 67, 68, 69, 70, 71, 72, 73, 74, 75, 76, 77, 78, 79, 80, 81, 82, 83, 84, 85, 86, 87, 88, 89, 90, 91, 92, 93, 94, 95, 96, 97, 98, 99, 100, 101, 102, 103, 104, 105, 106, 107, 108, 109, 110, 111, 112, 113, 114, 115, 116, 117, 577, 579, 581, 583, 585, 587, 589, 591, 593, 595, 597, 599, 601, 603, 605, 607, 609, 611, 613, 615, 617, 619, 621, 623, 625, or 627, a variant, derivative, orthologue, paralogue or homologue thereof, in which:

[0764] the amino acid at Mutated site 4 is Arg, and the amino acid at Mutated site 5 is Ser.

[0765] In another preferred embodiment, the mutated PPO comprises a sequence of SEQ ID NO: 1, 2, 3, 4, 5, 6, 7, 8, 9, 10, 11, 12, 13, 14, 15, 16, 17, 18, 19, 20, 21, 22, 23, 24, 25, 26, 27, 28, 29, 30, 31, 32, 33, 34, 35, 36, 37, 38, 39, 40, 41, 42, 43, 44, 45, 46, 47, 48, 49, 50, 51, 52, 53, 54, 55, 56, 57, 58, 59, 60, 61, 62, 63, 64, 65, 66, 67, 68, 69, 70, 71, 72, 73, 74, 75, 76, 77, 78, 79, 80, 81, 82, 83, 84, 85, 86, 87, 88, 89, 90, 91, 92, 93, 94, 95, 96, 97, 98, 99, 100, 101, 102, 103, 104, 105, 106, 107, 108, 109, 110, 111, 112, 113, 114, 115, 116, 117, 577, 579, 581, 583, 585, 587, 589, 591, 593, 595, 597, 599, 601, 603, 605, 607, 609, 611, 613, 615, 617, 619, 621, 623, 625, or 627, a variant, derivative, orthologue, paralogue or homologue thereof, in which:

[0766] the amino acid at Mutated site 4 is Arg, and the amino acid at Mutated site 5 is Thr.

[0767] In another preferred embodiment, the mutated PPO comprises a sequence of SEQ ID NO: 1, 2, 3, 4, 5, 6, 7, 8, 9, 10, 11, 12, 13, 14, 15, 16, 17, 18, 19, 20, 21, 22, 23, 24, 25, 26, 27, 28, 29, 30, 31, 32, 33, 34, 35, 36, 37, 38, 39, 40, 41, 42, 43, 44, 45, 46, 47, 48, 49, 50, 51, 52, 53, 54, 55, 56, 57, 58, 59, 60, 61, 62, 63, 64, 65, 66, 67, 68, 69, 70, 71, 72, 73, 74, 75, 76, 77, 78, 79, 80, 81, 82, 83, 84, 85, 86, 87, 88, 89, 90, 91, 92, 93, 94, 95, 96, 97, 98, 99, 100, 101, 102, 103, 104, 105, 106, 107, 108, 109, 110, 111, 112, 113, 114, 115, 116, 117, 577, 579, 581, 583, 585, 587, 589, 591, 593, 595, 597, 599, 601, 603, 605, 607, 609, 611, 613, 615, 617, 619, 621, 623, 625, or 627, a variant, derivative, orthologue, paralogue or homologue thereof, in which:

[0768] the amino acid at Mutated site 4 is Arg, and the amino acid at Mutated site 5 is Asn.

[0769] In another preferred embodiment, the mutated PPO comprises a sequence of SEQ ID NO: 1, 2, 3, 4, 5, 6, 7, 8, 9, 10, 11, 12, 13, 14, 15, 16, 17, 18, 19, 20, 21, 22, 23, 24, 25, 26, 27, 28, 29, 30, 31, 32, 33, 34, 35, 36, 37, 38, 39, 40, 41, 42, 43, 44, 45, 46, 47, 48, 49, 50, 51, 52, 53, 54, 55, 56, 57, 58, 59, 60, 61, 62, 63, 64, 65, 66, 67, 68, 69, 70, 71, 72, 73, 74, 75, 76, 77, 78, 79, 80, 81, 82, 83, 84, 85, 86, 87, 88, 89, 90, 91, 92, 93, 94, 95, 96, 97, 98, 99, 100, 101, 102, 103, 104, 105, 106, 107, 108, 109, 110, 111, 112, 113, 114, 115, 116, 117, 577, 579, 581, 583, 585, 587, 589, 591, 593, 595, 597, 599, 601, 603, 605, 607, 609, 611, 613, 615, 617, 619, 621, 623, 625, or 627, a variant, derivative, orthologue, paralogue or homologue thereof, in which:

[0770] the amino acid at Mutated site 4 is Arg, and the amino acid at Mutated site 5 is Gln.

[0771] In another preferred embodiment, the mutated PPO comprises a sequence of SEQ ID NO: 1, 2, 3, 4, 5, 6, 7, 8, 9, 10, 11, 12, 13, 14, 15, 16, 17, 18, 19, 20, 21, 22, 23, 24, 25, 26, 27, 28, 29, 30, 31, 32, 33, 34, 35, 36, 37, 38, 39, 40, 41, 42, 43, 44, 45, 46, 47, 48, 49, 50, 51, 52, 53, 54, 55, 56, 57, 58, 59, 60, 61, 62, 63, 64, 65, 66, 67, 68, 69, 70, 71, 72, 73, 74, 75, 76, 77, 78, 79, 80, 81, 82, 83, 84, 85, 86, 87, 88, 89, 90, 91, 92, 93, 94, 95, 96, 97, 98, 99, 100, 101, 102, 103, 104, 105, 106, 107, 108, 109, 110, 111, 112, 113, 114, 115, 116, 117, 577, 579, 581, 583, 585, 587, 589, 591, 593, 595, 597, 599, 601, 603, 605, 607, 609, 611, 613, 615, 617, 619, 621, 623, 625, or 627, a variant, derivative, orthologue, paralogue or homologue thereof, in which:

[0772] the amino acid at Mutated site 4 is Arg, and the amino acid at Mutated site 5 is Cys.

[0773] In another preferred embodiment, the mutated PPO comprises a sequence of SEQ ID NO: 1, 2, 3, 4, 5, 6, 7, 8, 9, 10, 11, 12, 13, 14, 15, 16, 17, 18, 19, 20, 21, 22, 23, 24, 25, 26, 27, 28, 29, 30, 31, 32, 33, 34, 35, 36, 37, 38, 39, 40, 41, 42, 43, 44, 45, 46, 47, 48, 49, 50, 51, 52, 53, 54, 55, 56, 57, 58, 59, 60, 61, 62, 63, 64, 65, 66, 67, 68, 69, 70, 71, 72, 73, 74, 75, 76, 77, 78, 79, 80, 81, 82, 83, 84, 85, 86, 87, 88, 89, 90, 91, 92, 93, 94, 95, 96, 97, 98, 99, 100, 101, 102, 103, 104, 105, 106, 107, 108, 109, 110, 111, 112, 113, 114, 115, 116, 117, 577, 579, 581, 583, 585, 587, 589, 591, 593, 595, 597, 599, 601, 603, 605, 607, 609, 611, 613, 615, 617, 619, 621, 623, 625, or 627, a variant, derivative, orthologue, paralogue or homologue thereof, in which:

[0774] the amino acid at Mutated site 4 is Arg, and the amino acid at Mutated site 5 is Gly.

[0775] In another preferred embodiment, the mutated PPO comprises a sequence of SEQ ID NO: 1, 2, 3, 4, 5, 6, 7, 8, 9, 10, 11, 12, 13, 14, 15, 16, 17, 18, 19, 20, 21, 22, 23, 24, 25, 26, 27, 28, 29, 30, 31, 32, 33, 34, 35, 36, 37, 38, 39, 40, 41, 42, 43, 44, 45, 46, 47, 48, 49, 50, 51, 52, 53, 54, 55, 56, 57, 58, 59, 60, 61, 62, 63, 64, 65, 66, 67, 68, 69, 70, 71, 72, 73, 74, 75, 76, 77, 78, 79, 80, 81, 82, 83, 84, 85, 86, 87, 88, 89, 90, 91, 92, 93, 94, 95, 96, 97, 98, 99, 100, 101, 102, 103, 104, 105, 106, 107, 108, 109, 110, 111, 112, 113, 114, 115, 116, 117, 577, 579, 581, 583, 585, 587, 589, 591, 593, 595, 597, 599, 601, 603, 605, 607, 609, 611, 613, 615, 617, 619, 621, 623, 625, or 627, a variant, derivative, orthologue, paralogue or homologue thereof, in which:

[0776] the amino acid at Mutated site 4 is Arg, and the amino acid at Mutated site 5 is Pro.

[0777] In another preferred embodiment, the mutated PPO comprises a sequence of SEQ ID NO: 1, 2, 3, 4, 5, 6, 7, 8, 9, 10, 11, 12, 13, 14, 15, 16, 17, 18, 19, 20, 21, 22, 23, 24, 25, 26, 27, 28, 29, 30, 31, 32, 33, 34, 35, 36, 37, 38, 39, 40, 41, 42, 43, 44, 45, 46, 47, 48, 49, 50, 51, 52, 53, 54, 55, 56, 57, 58, 59, 60, 61, 62, 63, 64, 65, 66, 67, 68, 69, 70, 71, 72, 73, 74, 75, 76, 77, 78, 79, 80, 81, 82, 83, 84, 85, 86, 87, 88, 89, 90, 91, 92, 93, 94, 95, 96, 97, 98, 99, 100, 101, 102, 103, 104, 105, 106, 107, 108, 109, 110, 111, 112, 113, 114, 115, 116, 117, 577, 579, 581, 583, 585, 587, 589, 591, 593, 595, 597, 599, 601, 603, 605, 607, 609, 611, 613, 615, 617, 619, 621, 623, 625, or 627, a variant, derivative, orthologue, paralogue or homologue thereof, in which:

[0778] the amino acid at Mutated site 4 is Arg, and the amino acid at Mutated site 5 is Arg.

[0779] In another preferred embodiment, the mutated PPO comprises a sequence of SEQ ID NO: 1, 2, 3, 4, 5, 6, 7, 8, 9, 10, 11, 12, 13, 14, 15, 16, 17, 18, 19, 20, 21, 22, 23, 24, 25, 26, 27, 28, 29, 30, 31, 32, 33, 34, 35, 36, 37, 38, 39, 40, 41, 42, 43, 44, 45, 46, 47, 48, 49, 50, 51, 52, 53, 54, 55, 56, 57, 58, 59, 60, 61, 62, 63, 64, 65, 66, 67, 68, 69, 70, 71, 72, 73, 74, 75, 76, 77, 78, 79, 80, 81, 82, 83, 84, 85, 86, 87, 88, 89, 90, 91, 92, 93, 94, 95, 96, 97, 98, 99, 100, 101, 102, 103, 104, 105, 106, 107, 108, 109, 110, 111, 112, 113, 114, 115, 116, 117, 577, 579, 581, 583, 585, 587, 589, 591, 593, 595, 597, 599, 601, 603, 605, 607, 609, 611, 613, 615, 617, 619, 621, 623, 625, or 627, a variant, derivative, orthologue, paralogue or homologue thereof, in which:

[0780] the amino acid at Mutated site 4 is Arg, and the amino acid at Mutated site 5 is Tyr.

[0781] In another preferred embodiment, the mutated PPO comprises a sequence of SEQ ID NO: 1, 2, 3, 4, 5, 6, 7, 8, 9, 10, 11, 12, 13, 14, 15, 16, 17, 18, 19, 20, 21, 22, 23, 24, 25, 26, 27, 28, 29, 30, 31, 32, 33, 34, 35, 36, 37, 38, 39, 40, 41, 42, 43, 44, 45, 46, 47, 48, 49, 50, 51, 52, 53, 54, 55, 56, 57, 58, 59, 60, 61, 62, 63, 64, 65, 66, 67, 68, 69, 70, 71, 72, 73, 74, 75, 76, 77, 78, 79, 80, 81, 82, 83, 84, 85, 86, 87, 88, 89, 90, 91, 92, 93, 94, 95, 96, 97, 98, 99, 100, 101, 102, 103, 104, 105, 106, 107, 108, 109, 110, 111, 112, 113, 114, 115, 116, 117, 577, 579, 581, 583, 585, 587, 589, 591, 593, 595, 597, 599, 601, 603, 605, 607, 609, 611, 613, 615, 617, 619, 621, 623, 625, or 627, a variant, derivative, orthologue, paralogue or homologue thereof, in which:

[0782] the amino acid at Mutated site 4 is Arg, and the amino acid at Mutated site 5 is Trp.

[0783] In another preferred embodiment, the mutated PPO comprises a sequence of SEQ ID NO: 1, 2, 3, 4, 5, 6, 7, 8, 9, 10, 11, 12, 13, 14, 15, 16, 17, 18, 19, 20, 21, 22, 23, 24, 25, 26, 27, 28, 29, 30, 31, 32, 33, 34, 35, 36, 37, 38, 39, 40, 41, 42, 43, 44, 45, 46, 47, 48, 49, 50, 51, 52, 53, 54, 55, 56, 57, 58, 59, 60, 61, 62, 63, 64, 65, 66, 67, 68, 69, 70, 71, 72, 73, 74, 75, 76, 77, 78, 79, 80, 81, 82, 83, 84, 85, 86, 87, 88, 89, 90, 91, 92, 93, 94, 95, 96, 97, 98, 99, 100, 101, 102, 103, 104, 105, 106, 107, 108, 109, 110, 111, 112, 113, 114, 115, 116, 117, 577, 579, 581, 583, 585, 587, 589, 591, 593, 595, 597, 599, 601, 603, 605, 607, 609, 611, 613, 615, 617, 619, 621, 623, 625, or 627, a variant, derivative, orthologue, paralogue or homologue thereof, in which:

[0784] the amino acid at Mutated site 4 is Val, and the amino acid at Mutated site 5 is Ala.

[0785] In another preferred embodiment, the mutated PPO comprises a sequence of SEQ ID NO: 1, 2, 3, 4, 5, 6, 7, 8, 9, 10, 11, 12, 13, 14, 15, 16, 17, 18, 19, 20, 21, 22, 23, 24, 25, 26, 27, 28, 29, 30, 31, 32, 33, 34, 35, 36, 37, 38, 39, 40, 41, 42, 43, 44, 45, 46, 47, 48, 49, 50, 51, 52, 53, 54, 55, 56, 57, 58, 59, 60, 61, 62, 63, 64, 65, 66, 67, 68, 69, 70, 71, 72, 73, 74, 75, 76, 77, 78, 79, 80, 81, 82, 83, 84, 85, 86, 87, 88, 89, 90, 91, 92, 93, 94, 95, 96, 97, 98, 99, 100, 101, 102, 103, 104, 105, 106, 107, 108, 109, 110, 111, 112, 113, 114, 115, 116, 117, 577, 579, 581, 583, 585, 587, 589, 591, 593, 595, 597, 599, 601, 603, 605, 607, 609, 611, 613, 615, 617, 619, 621, 623, 625, or 627, a variant, derivative, orthologue, paralogue or homologue thereof, in which:

[0786] the amino acid at Mutated site 4 is Val, and the amino acid at Mutated site 5 is Leu.

[0787] In another preferred embodiment, the mutated PPO comprises a sequence of SEQ ID NO: 1, 2, 3, 4, 5, 6, 7, 8, 9, 10, 11, 12, 13, 14, 15, 16, 17, 18, 19, 20, 21, 22, 23, 24, 25, 26, 27, 28, 29, 30, 31, 32, 33, 34, 35, 36, 37, 38, 39, 40, 41, 42, 43, 44, 45, 46, 47, 48, 49, 50, 51, 52, 53, 54, 55, 56, 57, 58, 59, 60, 61, 62, 63, 64, 65, 66, 67, 68, 69, 70, 71, 72, 73, 74, 75, 76, 77, 78, 79, 80, 81, 82, 83, 84, 85, 86, 87, 88, 89, 90, 91, 92, 93, 94, 95, 96, 97, 98, 99, 100, 101, 102, 103, 104, 105, 106, 107, 108, 109, 110, 111, 112, 113, 114, 115, 116, 117, 577, 579, 581, 583, 585, 587, 589, 591, 593, 595, 597, 599, 601, 603, 605, 607, 609, 611, 613, 615, 617, 619, 621, 623, 625, or 627, a variant, derivative, orthologue, paralogue or homologue thereof, in which:

[0788] the amino acid at Mutated site 4 is Val, and the amino acid at Mutated site 5 is Val.

[0789] In another preferred embodiment, the mutated PPO comprises a sequence of SEQ ID NO: 1, 2, 3, 4, 5, 6, 7, 8, 9, 10, 11, 12, 13, 14, 15, 16, 17, 18, 19, 20, 21, 22, 23, 24, 25, 26, 27, 28, 29, 30, 31, 32, 33, 34, 35, 36, 37, 38, 39, 40, 41, 42, 43, 44, 45, 46, 47, 48, 49, 50, 51, 52, 53, 54, 55, 56, 57, 58, 59, 60, 61, 62, 63, 64, 65, 66, 67, 68, 69, 70, 71, 72, 73, 74, 75, 76, 77, 78, 79, 80, 81, 82, 83, 84, 85, 86, 87, 88, 89, 90, 91, 92, 93, 94, 95, 96, 97, 98, 99, 100, 101, 102, 103, 104, 105, 106, 107, 108, 109, 110, 111, 112, 113, 114, 115, 116, 117, 577, 579, 581, 583, 585, 587, 589, 591, 593, 595, 597, 599, 601, 603, 605, 607, 609, 611, 613, 615, 617, 619, 621, 623, 625, or 627, a variant, derivative, orthologue, paralogue or homologue thereof, in which:

[0790] the amino acid at Mutated site 4 is Val, and the amino acid at Mutated site 5 is Ile.

[0791] In another preferred embodiment, the mutated PPO comprises a sequence of SEQ ID NO: 1, 2, 3, 4, 5, 6, 7, 8, 9, 10, 11, 12, 13, 14, 15, 16, 17, 18, 19, 20, 21, 22, 23, 24, 25, 26, 27, 28, 29, 30, 31, 32, 33, 34, 35, 36, 37, 38, 39, 40, 41, 42, 43, 44, 45, 46, 47, 48, 49, 50, 51, 52, 53, 54, 55, 56, 57, 58, 59, 60, 61, 62, 63, 64, 65, 66, 67, 68, 69, 70, 71, 72, 73, 74, 75, 76, 77, 78, 79, 80, 81, 82, 83, 84, 85, 86, 87, 88, 89, 90, 91, 92, 93, 94, 95, 96, 97, 98, 99, 100, 101, 102, 103, 104, 105, 106, 107, 108, 109, 110, 111, 112, 113, 114, 115, 116, 117, 577, 579, 581, 583, 585, 587, 589, 591, 593, 595, 597, 599, 601, 603, 605, 607, 609, 611, 613, 615, 617, 619, 621, 623, 625, or 627, a variant, derivative, orthologue, paralogue or homologue thereof, in which:

[0792] the amino acid at Mutated site 4 is Val, and the amino acid at Mutated site 5 is Met.

[0793] In another preferred embodiment, the mutated PPO comprises a sequence of SEQ ID NO: 1, 2, 3, 4, 5, 6, 7, 8, 9, 10, 11, 12, 13, 14, 15, 16, 17, 18, 19, 20, 21, 22, 23, 24, 25, 26, 27, 28, 29, 30, 31, 32, 33, 34, 35, 36, 37, 38, 39, 40, 41, 42, 43, 44, 45, 46, 47, 48, 49, 50, 51, 52, 53, 54, 55, 56, 57, 58, 59, 60, 61, 62, 63, 64, 65, 66, 67, 68, 69, 70, 71, 72, 73, 74, 75, 76, 77, 78, 79, 80, 81, 82, 83, 84, 85, 86, 87, 88, 89, 90, 91, 92, 93, 94, 95, 96, 97, 98, 99, 100, 101, 102, 103, 104, 105, 106, 107, 108, 109, 110, 111, 112, 113, 114, 115, 116, 117, 577, 579, 581, 583, 585, 587, 589, 591, 593, 595, 597, 599, 601, 603, 605, 607, 609, 611, 613, 615, 617, 619, 621, 623, 625, or 627, a variant, derivative, orthologue, paralogue or homologue thereof, in which:

[0794] the amino acid at Mutated site 4 is Val, and the amino acid at Mutated site 5 is His.

[0795] In another preferred embodiment, the mutated PPO comprises a sequence of SEQ ID NO: 1, 2, 3, 4, 5, 6, 7, 8, 9, 10, 11, 12, 13, 14, 15, 16, 17, 18, 19, 20, 21, 22, 23, 24, 25, 26, 27, 28, 29, 30, 31, 32, 33, 34, 35, 36, 37, 38, 39, 40, 41, 42, 43, 44, 45, 46, 47, 48, 49, 50, 51, 52, 53, 54, 55, 56, 57, 58, 59, 60, 61, 62, 63, 64, 65, 66, 67, 68, 69, 70, 71, 72, 73, 74, 75, 76, 77, 78, 79, 80, 81, 82, 83, 84, 85, 86, 87, 88, 89, 90, 91, 92, 93, 94, 95, 96, 97, 98, 99, 100, 101, 102, 103, 104, 105, 106, 107, 108, 109, 110, 111, 112, 113, 114, 115, 116, 117, 577, 579, 581, 583, 585, 587, 589, 591, 593, 595, 597, 599, 601, 603, 605, 607, 609, 611, 613, 615, 617, 619, 621, 623, 625, or 627, a variant, derivative, orthologue, paralogue or homologue thereof, in which:

[0796] the amino acid at Mutated site 4 is Val, and the amino acid at Mutated site 5 is Lys.

[0797] In another preferred embodiment, the mutated PPO comprises a sequence of SEQ ID NO: 1, 2, 3, 4, 5, 6, 7, 8, 9, 10, 11, 12, 13, 14, 15, 16, 17, 18, 19, 20, 21, 22, 23, 24, 25, 26, 27, 28, 29, 30, 31, 32, 33, 34, 35, 36, 37, 38, 39, 40, 41, 42, 43, 44, 45, 46, 47, 48, 49, 50, 51, 52, 53, 54, 55, 56, 57, 58, 59, 60, 61, 62, 63, 64, 65, 66, 67, 68, 69, 70, 71, 72, 73, 74, 75, 76, 77, 78, 79, 80, 81, 82, 83, 84, 85, 86, 87, 88, 89, 90, 91, 92, 93, 94, 95, 96, 97, 98, 99, 100, 101, 102, 103, 104, 105, 106, 107, 108, 109, 110, 111, 112, 113, 114, 115, 116, 117, 577, 579, 581, 583, 585, 587, 589, 591, 593, 595, 597, 599, 601, 603, 605, 607, 609, 611, 613, 615, 617, 619, 621, 623, 625, or 627, a variant, derivative, orthologue, paralogue or homologue thereof, in which:

[0798] the amino acid at Mutated site 4 is Val, and the amino acid at Mutated site 5 is Asp.

[0799] In another preferred embodiment, the mutated PPO comprises a sequence of SEQ ID NO: 1, 2, 3, 4, 5, 6, 7, 8, 9, 10, 11, 12, 13, 14, 15, 16, 17, 18, 19, 20, 21, 22, 23, 24, 25, 26, 27, 28, 29, 30, 31, 32, 33, 34, 35, 36, 37, 38, 39, 40, 41, 42, 43, 44, 45, 46, 47, 48, 49, 50, 51, 52, 53, 54, 55, 56, 57, 58, 59, 60, 61, 62, 63, 64, 65, 66, 67, 68, 69, 70, 71, 72, 73, 74, 75, 76, 77, 78, 79, 80, 81, 82, 83, 84, 85, 86, 87, 88, 89, 90, 91, 92, 93, 94, 95, 96, 97, 98, 99, 100, 101, 102, 103, 104, 105, 106, 107, 108, 109, 110, 111, 112, 113, 114, 115, 116, 117, 577, 579, 581, 583, 585, 587, 589, 591, 593, 595, 597, 599, 601, 603, 605, 607, 609, 611, 613, 615, 617, 619, 621, 623, 625, or 627, a variant, derivative, orthologue, paralogue or homologue thereof, in which:

[0800] the amino acid at Mutated site 4 is Val, and the amino acid at Mutated site 5 is Glu.

[0801] In another preferred embodiment, the mutated PPO comprises a sequence of SEQ ID NO: 1, 2, 3, 4, 5, 6, 7, 8, 9, 10, 11, 12, 13, 14, 15, 16, 17, 18, 19, 20, 21, 22, 23, 24, 25, 26, 27, 28, 29, 30, 31, 32, 33, 34, 35, 36, 37, 38, 39, 40, 41, 42, 43, 44, 45, 46, 47, 48, 49, 50, 51, 52, 53, 54, 55, 56, 57, 58, 59, 60, 61, 62, 63, 64, 65, 66, 67, 68, 69, 70, 71, 72, 73, 74, 75, 76, 77, 78, 79, 80, 81, 82, 83, 84, 85, 86, 87, 88, 89, 90, 91, 92, 93, 94, 95, 96, 97, 98, 99, 100, 101, 102, 103, 104, 105, 106, 107, 108, 109, 110, 111, 112, 113, 114, 115, 116, 117, 577, 579, 581, 583, 585, 587, 589, 591, 593, 595, 597, 599, 601, 603, 605, 607, 609, 611, 613, 615, 617, 619, 621, 623, 625, or 627, a variant, derivative, orthologue, paralogue or homologue thereof, in which:

[0802] the amino acid at Mutated site 4 is Val, and the amino acid at Mutated site 5 is Ser.

[0803] In another preferred embodiment, the mutated PPO comprises a sequence of SEQ ID NO: 1, 2, 3, 4, 5, 6, 7, 8, 9, 10, 11, 12, 13, 14, 15, 16, 17, 18, 19, 20, 21, 22, 23, 24, 25, 26, 27, 28, 29, 30, 31, 32, 33, 34, 35, 36, 37, 38, 39, 40, 41, 42, 43, 44, 45, 46, 47, 48, 49, 50, 51, 52, 53, 54, 55, 56, 57, 58, 59, 60, 61, 62, 63, 64, 65, 66, 67, 68, 69, 70, 71, 72, 73, 74, 75, 76, 77, 78, 79, 80, 81, 82, 83, 84, 85, 86, 87, 88, 89, 90, 91, 92, 93, 94, 95, 96, 97, 98, 99, 100, 101, 102, 103, 104, 105, 106, 107, 108, 109, 110, 111, 112, 113, 114, 115, 116, 117, 577, 579, 581, 583, 585, 587, 589, 591, 593, 595, 597, 599, 601, 603, 605, 607, 609, 611, 613, 615, 617, 619, 621, 623, 625, or 627, a variant, derivative, orthologue, paralogue or homologue thereof, in which:

[0804] the amino acid at Mutated site 4 is Val, and the amino acid at Mutated site 5 is Thr.

[0805] In another preferred embodiment, the mutated PPO comprises a sequence of SEQ ID NO: 1, 2, 3, 4, 5, 6, 7, 8, 9, 10, 11, 12, 13, 14, 15, 16, 17, 18, 19, 20, 21, 22, 23, 24, 25, 26, 27, 28, 29, 30, 31, 32, 33, 34, 35, 36, 37, 38, 39, 40, 41, 42, 43, 44, 45, 46, 47, 48, 49, 50, 51, 52, 53, 54, 55, 56, 57, 58, 59, 60, 61, 62, 63, 64, 65, 66, 67, 68, 69, 70, 71, 72, 73, 74, 75, 76, 77, 78, 79, 80, 81, 82, 83, 84, 85, 86, 87, 88, 89, 90, 91, 92, 93, 94, 95, 96, 97, 98, 99, 100, 101, 102, 103, 104, 105, 106, 107, 108, 109, 110, 111, 112, 113, 114, 115, 116, 117, 577, 579, 581, 583, 585, 587, 589, 591, 593, 595, 597, 599, 601, 603, 605, 607, 609, 611, 613, 615, 617, 619, 621, 623, 625, or 627, a variant, derivative, orthologue, paralogue or homologue thereof, in which:

[0806] the amino acid at Mutated site 4 is Val, and the amino acid at Mutated site 5 is Asn.

[0807] In another preferred embodiment, the mutated PPO comprises a sequence of SEQ ID NO: 1, 2, 3, 4, 5, 6, 7, 8, 9, 10, 11, 12, 13, 14, 15, 16, 17, 18, 19, 20, 21, 22, 23, 24, 25, 26, 27, 28, 29, 30, 31, 32, 33, 34, 35, 36, 37, 38, 39, 40, 41, 42, 43, 44, 45, 46, 47, 48, 49, 50, 51, 52, 53, 54, 55, 56, 57, 58, 59, 60, 61, 62, 63, 64, 65, 66, 67, 68, 69, 70, 71, 72, 73, 74, 75, 76, 77, 78, 79, 80, 81, 82, 83, 84, 85, 86, 87, 88, 89, 90, 91, 92, 93, 94, 95, 96, 97, 98, 99, 100, 101, 102, 103, 104, 105, 106, 107, 108, 109, 110, 111, 112, 113, 114, 115, 116, 117, 577, 579, 581, 583, 585, 587, 589, 591, 593, 595, 597, 599, 601, 603, 605, 607, 609, 611, 613, 615, 617, 619, 621, 623, 625, or 627, a variant, derivative, orthologue, paralogue or homologue thereof, in which:

[0808] the amino acid at Mutated site 4 is Val, and the amino acid at Mutated site 5 is Gln.

[0809] In another preferred embodiment, the mutated PPO comprises a sequence of SEQ ID NO: 1, 2, 3, 4, 5, 6, 7, 8, 9, 10, 11, 12, 13, 14, 15, 16, 17, 18, 19, 20, 21, 22, 23, 24, 25, 26, 27, 28, 29, 30, 31, 32, 33, 34, 35, 36, 37, 38, 39, 40, 41, 42, 43, 44, 45, 46, 47, 48, 49, 50, 51, 52, 53, 54, 55, 56, 57, 58, 59, 60, 61, 62, 63, 64, 65, 66, 67, 68, 69, 70, 71, 72, 73, 74, 75, 76, 77, 78, 79, 80, 81, 82, 83, 84, 85, 86, 87, 88, 89, 90, 91, 92, 93, 94, 95, 96, 97, 98, 99, 100, 101, 102, 103, 104, 105, 106, 107, 108, 109, 110, 111, 112, 113, 114, 115, 116, 117, 577, 579, 581, 583, 585, 587, 589, 591, 593, 595, 597, 599, 601, 603, 605, 607, 609, 611, 613, 615, 617, 619, 621, 623, 625, or 627, a variant, derivative, orthologue, paralogue or homologue thereof, in which:

[0810] the amino acid at Mutated site 4 is Val, and the amino acid at Mutated site 5 is Cys.

[0811] In another preferred embodiment, the mutated PPO comprises a sequence of SEQ ID NO: 1, 2, 3, 4, 5, 6, 7, 8, 9, 10, 11, 12, 13, 14, 15, 16, 17, 18, 19, 20, 21, 22, 23, 24, 25, 26, 27, 28, 29, 30, 31, 32, 33, 34, 35, 36, 37, 38, 39, 40, 41, 42, 43, 44, 45, 46, 47, 48, 49, 50, 51, 52, 53, 54, 55, 56, 57, 58, 59, 60, 61, 62, 63, 64, 65, 66, 67, 68, 69, 70, 71, 72, 73, 74, 75, 76, 77, 78, 79, 80, 81, 82, 83, 84, 85, 86, 87, 88, 89, 90, 91, 92, 93, 94, 95, 96, 97, 98, 99, 100, 101, 102, 103, 104, 105, 106, 107, 108, 109, 110, 111, 112, 113, 114, 115, 116, 117, 577, 579, 581, 583, 585, 587, 589, 591, 593, 595, 597, 599, 601, 603, 605, 607, 609, 611, 613, 615, 617, 619, 621, 623, 625, or 627, a variant, derivative, orthologue, paralogue or homologue thereof, in which:

[0812] the amino acid at Mutated site 4 is Val, and the amino acid at Mutated site 5 is Gly.

[0813] In another preferred embodiment, the mutated PPO comprises a sequence of SEQ ID NO: 1, 2, 3, 4, 5, 6, 7, 8, 9, 10, 11, 12, 13, 14, 15, 16, 17, 18, 19, 20, 21, 22, 23, 24, 25, 26, 27, 28, 29, 30, 31, 32, 33, 34, 35, 36, 37, 38, 39, 40, 41, 42, 43, 44, 45, 46, 47, 48, 49, 50, 51, 52, 53, 54, 55, 56, 57, 58, 59, 60, 61, 62, 63, 64, 65, 66, 67, 68, 69, 70, 71, 72, 73, 74, 75, 76, 77, 78, 79, 80, 81, 82, 83, 84, 85, 86, 87, 88, 89, 90, 91, 92, 93, 94, 95, 96, 97, 98, 99, 100, 101, 102, 103, 104, 105, 106, 107, 108, 109, 110, 111, 112, 113, 114, 115, 116, 117, 577, 579, 581, 583, 585, 587, 589, 591, 593, 595, 597, 599, 601, 603, 605, 607, 609, 611, 613, 615, 617, 619, 621, 623, 625, or 627, a variant, derivative, orthologue, paralogue or homologue thereof, in which:

[0814] the amino acid at Mutated site 4 is Val, and the amino acid at Mutated site 5 is Pro.

[0815] In another preferred embodiment, the mutated PPO comprises a sequence of SEQ ID NO: 1, 2, 3, 4, 5, 6, 7, 8, 9, 10, 11, 12, 13, 14, 15, 16, 17, 18, 19, 20, 21, 22, 23, 24, 25, 26, 27, 28, 29, 30, 31, 32, 33, 34, 35, 36, 37, 38, 39, 40, 41, 42, 43, 44, 45, 46, 47, 48, 49, 50, 51, 52, 53, 54, 55, 56, 57, 58, 59, 60, 61, 62, 63, 64, 65, 66, 67, 68, 69, 70, 71, 72, 73, 74, 75, 76, 77, 78, 79, 80, 81, 82, 83, 84, 85, 86, 87, 88, 89, 90, 91, 92, 93, 94, 95, 96, 97, 98, 99, 100, 101, 102, 103, 104, 105, 106, 107, 108, 109, 110, 111, 112, 113, 114, 115, 116, 117, 577, 579, 581, 583, 585, 587, 589, 591, 593, 595, 597, 599, 601, 603, 605, 607, 609, 611, 613, 615, 617, 619, 621, 623, 625, or 627, a variant, derivative, orthologue, paralogue or homologue thereof, in which:

[0816] the amino acid at Mutated site 4 is Val, and the amino acid at Mutated site 5 is Arg.

[0817] In another preferred embodiment, the mutated PPO comprises a sequence of SEQ ID NO: 1, 2, 3, 4, 5, 6, 7, 8, 9, 10, 11, 12, 13, 14, 15, 16, 17, 18, 19, 20, 21, 22, 23, 24, 25, 26, 27, 28, 29, 30, 31, 32, 33, 34, 35, 36, 37, 38, 39, 40, 41, 42, 43, 44, 45, 46, 47, 48, 49, 50, 51, 52, 53, 54, 55, 56, 57, 58, 59, 60, 61, 62, 63, 64, 65, 66, 67, 68, 69, 70, 71, 72, 73, 74, 75, 76, 77, 78, 79, 80, 81, 82, 83, 84, 85, 86, 87, 88, 89, 90, 91, 92, 93, 94, 95, 96, 97, 98, 99, 100, 101, 102, 103, 104, 105, 106, 107, 108, 109, 110, 111, 112, 113, 114, 115, 116, 117, 577, 579, 581, 583, 585, 587, 589, 591, 593, 595, 597, 599, 601, 603, 605, 607, 609, 611, 613, 615, 617, 619, 621, 623, 625, or 627, a variant, derivative, orthologue, paralogue or homologue thereof, in which:

[0818] the amino acid at Mutated site 4 is Val, and the amino acid at Mutated site 5 is Tyr.

[0819] In another preferred embodiment, the mutated PPO comprises a sequence of SEQ ID NO: 1, 2, 3, 4, 5, 6, 7, 8, 9, 10, 11, 12, 13, 14, 15, 16, 17, 18, 19, 20, 21, 22, 23, 24, 25, 26, 27, 28, 29, 30, 31, 32, 33, 34, 35, 36, 37, 38, 39, 40, 41, 42, 43, 44, 45, 46, 47, 48, 49, 50, 51, 52, 53, 54, 55, 56, 57, 58, 59, 60, 61, 62, 63, 64, 65, 66, 67, 68, 69, 70, 71, 72, 73, 74, 75, 76, 77, 78, 79, 80, 81, 82, 83, 84, 85, 86, 87, 88, 89, 90, 91, 92, 93, 94, 95, 96, 97, 98, 99, 100, 101, 102, 103, 104, 105, 106, 107, 108, 109, 110, 111, 112, 113, 114, 115, 116, 117, 577, 579, 581, 583, 585, 587, 589, 591, 593, 595, 597, 599, 601, 603, 605, 607, 609, 611, 613, 615, 617, 619, 621, 623, 625, or 627, a variant, derivative, orthologue, paralogue or homologue thereof, in which:

[0820] the amino acid at Mutated site 4 is Val, and the amino acid at Mutated site 5 is Trp.

[0821] In another preferred embodiment, the mutated PPO comprises a sequence of SEQ ID NO: 1, 2, 3, 4, 5, 6, 7, 8, 9, 10, 11, 12, 13, 14, 15, 16, 17, 18, 19, 20, 21, 22, 23, 24, 25, 26, 27, 28, 29, 30, 31, 32, 33, 34, 35, 36, 37, 38, 39, 40, 41, 42, 43, 44, 45, 46, 47, 48, 49, 50, 51, 52, 53, 54, 55, 56, 57, 58, 59, 60, 61, 62, 63, 64, 65, 66, 67, 68, 69, 70, 71, 72, 73, 74, 75, 76, 77, 78, 79, 80, 81, 82, 83, 84, 85, 86, 87, 88, 89, 90, 91, 92, 93, 94, 95, 96, 97, 98, 99, 100, 101, 102, 103, 104, 105, 106, 107, 108, 109, 110, 111, 112, 113, 114, 115, 116, 117, 577, 579, 581, 583, 585, 587, 589, 591, 593, 595, 597, 599, 601, 603, 605, 607, 609, 611, 613, 615, 617, 619, 621, 623, 625, or 627, a variant, derivative, orthologue, paralogue or homologue thereof, in which:

[0822] the amino acid at Mutated site 4 is Ile, and the amino acid at Mutated site 5 is Ala.

[0823] In another preferred embodiment, the mutated PPO comprises a sequence of SEQ ID NO: 1, 2, 3, 4, 5, 6, 7, 8, 9, 10, 11, 12, 13, 14, 15, 16, 17, 18, 19, 20, 21, 22, 23, 24, 25, 26, 27, 28, 29, 30, 31, 32, 33, 34, 35, 36, 37, 38, 39, 40, 41, 42, 43, 44, 45, 46, 47, 48, 49, 50, 51, 52, 53, 54, 55, 56, 57, 58, 59, 60, 61, 62, 63, 64, 65, 66, 67, 68, 69, 70, 71, 72, 73, 74, 75, 76, 77, 78, 79, 80, 81, 82, 83, 84, 85, 86, 87, 88, 89, 90, 91, 92, 93, 94, 95, 96, 97, 98, 99, 100, 101, 102, 103, 104, 105, 106, 107, 108, 109, 110, 111, 112, 113, 114, 115, 116, 117, 577, 579, 581, 583, 585, 587, 589, 591, 593, 595, 597, 599, 601, 603, 605, 607, 609, 611, 613, 615, 617, 619, 621, 623, 625, or 627, a variant, derivative, orthologue, paralogue or homologue thereof, in which:

[0824] the amino acid at Mutated site 4 is Ile, and the amino acid at Mutated site 5 is Leu.

[0825] In another preferred embodiment, the mutated PPO comprises a sequence of SEQ ID NO: 1, 2, 3, 4, 5, 6, 7, 8, 9, 10, 11, 12, 13, 14, 15, 16, 17, 18, 19, 20, 21, 22, 23, 24, 25, 26, 27, 28, 29, 30, 31, 32, 33, 34, 35, 36, 37, 38, 39, 40, 41, 42, 43, 44, 45, 46, 47, 48, 49, 50, 51, 52, 53, 54, 55, 56, 57, 58, 59, 60, 61, 62, 63, 64, 65, 66, 67, 68, 69, 70, 71, 72, 73, 74, 75, 76, 77, 78, 79, 80, 81, 82, 83, 84, 85, 86, 87, 88, 89, 90, 91, 92, 93, 94, 95, 96, 97, 98, 99, 100, 101, 102, 103, 104, 105, 106, 107, 108, 109, 110, 111, 112, 113, 114, 115, 116, 117, 577, 579, 581, 583, 585, 587, 589, 591, 593, 595, 597, 599, 601, 603, 605, 607, 609, 611, 613, 615, 617, 619, 621, 623, 625, or 627, a variant, derivative, orthologue, paralogue or homologue thereof, in which:

[0826] the amino acid at Mutated site 4 is Ile, and the amino acid at Mutated site 5 is Val.

[0827] In another preferred embodiment, the mutated PPO comprises a sequence of SEQ ID NO: 1, 2, 3, 4, 5, 6, 7, 8, 9, 10, 11, 12, 13, 14, 15, 16, 17, 18, 19, 20, 21, 22, 23, 24, 25, 26, 27, 28, 29, 30, 31, 32, 33, 34, 35, 36, 37, 38, 39, 40, 41, 42, 43, 44, 45, 46, 47, 48, 49, 50, 51, 52, 53, 54, 55, 56, 57, 58, 59, 60, 61, 62, 63, 64, 65, 66, 67, 68, 69, 70, 71, 72, 73, 74, 75, 76, 77, 78, 79, 80, 81, 82, 83, 84, 85, 86, 87, 88, 89, 90, 91, 92, 93, 94, 95, 96, 97, 98, 99, 100, 101, 102, 103, 104, 105, 106, 107, 108, 109, 110, 111, 112, 113, 114, 115, 116, 117, 577, 579, 581, 583, 585, 587, 589, 591, 593, 595, 597, 599, 601, 603, 605, 607, 609, 611, 613, 615, 617, 619, 621, 623, 625, or 627, a variant, derivative, orthologue, paralogue or homologue thereof, in which:

[0828] the amino acid at Mutated site 4 is Ile, and the amino acid at Mutated site 5 is Ile.

[0829] In another preferred embodiment, the mutated PPO comprises a sequence of SEQ ID NO: 1, 2, 3, 4, 5, 6, 7, 8, 9, 10, 11, 12, 13, 14, 15, 16, 17, 18, 19, 20, 21, 22, 23, 24, 25, 26, 27, 28, 29, 30, 31, 32, 33, 34, 35, 36, 37, 38, 39, 40, 41, 42, 43, 44, 45, 46, 47, 48, 49, 50, 51, 52, 53, 54, 55, 56, 57, 58, 59, 60, 61, 62, 63, 64, 65, 66, 67, 68, 69, 70, 71, 72, 73, 74, 75, 76, 77, 78, 79, 80, 81, 82, 83, 84, 85, 86, 87, 88, 89, 90, 91, 92, 93, 94, 95, 96, 97, 98, 99, 100, 101, 102, 103, 104, 105, 106, 107, 108, 109, 110, 111, 112, 113, 114, 115, 116, 117, 577, 579, 581, 583, 585, 587, 589, 591, 593, 595, 597, 599, 601, 603, 605, 607, 609, 611, 613, 615, 617, 619, 621, 623, 625, or 627, a variant, derivative, orthologue, paralogue or homologue thereof, in which:

[0830] the amino acid at Mutated site 4 is Ile, and the amino acid at Mutated site 5 is Met.

[0831] In another preferred embodiment, the mutated PPO comprises a sequence of SEQ ID NO: 1, 2, 3, 4, 5, 6, 7, 8, 9, 10, 11, 12, 13, 14, 15, 16, 17, 18, 19, 20, 21, 22, 23, 24, 25, 26, 27, 28, 29, 30, 31, 32, 33, 34, 35, 36, 37, 38, 39, 40, 41, 42, 43, 44, 45, 46, 47, 48, 49, 50, 51, 52, 53, 54, 55, 56, 57, 58, 59, 60, 61, 62, 63, 64, 65, 66, 67, 68, 69, 70, 71, 72, 73, 74, 75, 76, 77, 78, 79, 80, 81, 82, 83, 84, 85, 86, 87, 88, 89, 90, 91, 92, 93, 94, 95, 96, 97, 98, 99, 100, 101, 102, 103, 104, 105, 106, 107, 108, 109, 110, 111, 112, 113, 114, 115, 116, 117, 577, 579, 581, 583, 585, 587, 589, 591, 593, 595, 597, 599, 601, 603, 605, 607, 609, 611, 613, 615, 617, 619, 621, 623, 625, or 627, a variant, derivative, orthologue, paralogue or homologue thereof, in which:

[0832] the amino acid at Mutated site 4 is Ile, and the amino acid at Mutated site 5 is His.

[0833] In another preferred embodiment, the mutated PPO comprises a sequence of SEQ ID NO: 1, 2, 3, 4, 5, 6, 7, 8, 9, 10, 11, 12, 13, 14, 15, 16, 17, 18, 19, 20, 21, 22, 23, 24, 25, 26, 27, 28, 29, 30, 31, 32, 33, 34, 35, 36, 37, 38, 39, 40, 41, 42, 43, 44, 45, 46, 47, 48, 49, 50, 51, 52, 53, 54, 55, 56, 57, 58, 59, 60, 61, 62, 63, 64, 65, 66, 67, 68, 69, 70, 71, 72, 73, 74, 75, 76, 77, 78, 79, 80, 81, 82, 83, 84, 85, 86, 87, 88, 89, 90, 91, 92, 93, 94, 95, 96, 97, 98, 99, 100, 101, 102, 103, 104, 105, 106, 107, 108, 109, 110, 111, 112, 113, 114, 115, 116, 117, 577, 579, 581, 583, 585, 587, 589, 591, 593, 595, 597, 599, 601, 603, 605, 607, 609, 611, 613, 615, 617, 619, 621, 623, 625, or 627, a variant, derivative, orthologue, paralogue or homologue thereof, in which:

[0834] the amino acid at Mutated site 4 is Ile, and the amino acid at Mutated site 5 is Lys.

[0835] In another preferred embodiment, the mutated PPO comprises a sequence of SEQ ID NO: 1, 2, 3, 4, 5, 6, 7, 8, 9, 10, 11, 12, 13, 14, 15, 16, 17, 18, 19, 20, 21, 22, 23, 24, 25, 26, 27, 28, 29, 30, 31, 32, 33, 34, 35, 36, 37, 38, 39, 40, 41, 42, 43, 44, 45, 46, 47, 48, 49, 50, 51, 52, 53, 54, 55, 56, 57, 58, 59, 60, 61, 62, 63, 64, 65, 66, 67, 68, 69, 70, 71, 72, 73, 74, 75, 76, 77, 78, 79, 80, 81, 82, 83, 84, 85, 86, 87, 88, 89, 90, 91, 92, 93, 94, 95, 96, 97, 98, 99, 100, 101, 102, 103, 104, 105, 106, 107, 108, 109, 110, 111, 112, 113, 114, 115, 116, 117, 577, 579, 581, 583, 585, 587, 589, 591, 593, 595, 597, 599, 601, 603, 605, 607, 609, 611, 613, 615, 617, 619, 621, 623, 625, or 627, a variant, derivative, orthologue, paralogue or homologue thereof, in which:

[0836] the amino acid at Mutated site 4 is Ile, and the amino acid at Mutated site 5 is Asp.

[0837] In another preferred embodiment, the mutated PPO comprises a sequence of SEQ ID NO: 1, 2, 3, 4, 5, 6, 7, 8, 9, 10, 11, 12, 13, 14, 15, 16, 17, 18, 19, 20, 21, 22, 23, 24, 25, 26, 27, 28, 29, 30, 31, 32, 33, 34, 35, 36, 37, 38, 39, 40, 41, 42, 43, 44, 45, 46, 47, 48, 49, 50, 51, 52, 53, 54, 55, 56, 57, 58, 59, 60, 61, 62, 63, 64, 65, 66, 67, 68, 69, 70, 71, 72, 73, 74, 75, 76, 77, 78, 79, 80, 81, 82, 83, 84, 85, 86, 87, 88, 89, 90, 91, 92, 93, 94, 95, 96, 97, 98, 99, 100, 101, 102, 103, 104, 105, 106, 107, 108, 109, 110, 111, 112, 113, 114, 115, 116, 117, 577, 579, 581, 583, 585, 587, 589, 591, 593, 595, 597, 599, 601, 603, 605, 607, 609, 611, 613, 615, 617, 619, 621, 623, 625, or 627, a variant, derivative, orthologue, paralogue or homologue thereof, in which:

[0838] the amino acid at Mutated site 4 is Ile, and the amino acid at Mutated site 5 is Glu.

[0839] In another preferred embodiment, the mutated PPO comprises a sequence of SEQ ID NO: 1, 2, 3, 4, 5, 6, 7, 8, 9, 10, 11, 12, 13, 14, 15, 16, 17, 18, 19, 20, 21, 22, 23, 24, 25, 26, 27, 28, 29, 30, 31, 32, 33, 34, 35, 36, 37, 38, 39, 40, 41, 42, 43, 44, 45, 46, 47, 48, 49, 50, 51, 52, 53, 54, 55, 56, 57, 58, 59, 60, 61, 62, 63, 64, 65, 66, 67, 68, 69, 70, 71, 72, 73, 74, 75, 76, 77, 78, 79, 80, 81, 82, 83, 84, 85, 86, 87, 88, 89, 90, 91, 92, 93, 94, 95, 96, 97, 98, 99, 100, 101, 102, 103, 104, 105, 106, 107, 108, 109, 110, 111, 112, 113, 114, 115, 116, 117, 577, 579, 581, 583, 585, 587, 589, 591, 593, 595, 597, 599, 601, 603, 605, 607, 609, 611, 613, 615, 617, 619, 621, 623, 625, or 627, a variant, derivative, orthologue, paralogue or homologue thereof, in which:

[0840] the amino acid at Mutated site 4 is Ile, and the amino acid at Mutated site 5 is Ser.

[0841] In another preferred embodiment, the mutated PPO comprises a sequence of SEQ ID NO: 1, 2, 3, 4, 5, 6, 7, 8, 9, 10, 11, 12, 13, 14, 15, 16, 17, 18, 19, 20, 21, 22, 23, 24, 25, 26, 27, 28, 29, 30, 31, 32, 33, 34, 35, 36, 37, 38, 39, 40, 41, 42, 43, 44, 45, 46, 47, 48, 49, 50, 51, 52, 53, 54, 55, 56, 57, 58, 59, 60, 61, 62, 63, 64, 65, 66, 67, 68, 69, 70, 71, 72, 73, 74, 75, 76, 77, 78, 79, 80, 81, 82, 83, 84, 85, 86, 87, 88, 89, 90, 91, 92, 93, 94, 95, 96, 97, 98, 99, 100, 101, 102, 103, 104, 105, 106, 107, 108, 109, 110, 111, 112, 113, 114, 115, 116, 117, 577, 579, 581, 583, 585, 587, 589, 591, 593, 595, 597, 599, 601, 603, 605, 607, 609, 611, 613, 615, 617, 619, 621, 623, 625, or 627, a variant, derivative, orthologue, paralogue or homologue thereof, in which:

[0842] the amino acid at Mutated site 4 is Ile, and the amino acid at Mutated site 5 is Thr.

[0843] In another preferred embodiment, the mutated PPO comprises a sequence of SEQ ID NO: 1, 2, 3, 4, 5, 6, 7, 8, 9, 10, 11, 12, 13, 14, 15, 16, 17, 18, 19, 20, 21, 22, 23, 24, 25, 26, 27, 28, 29, 30, 31, 32, 33, 34, 35, 36, 37, 38, 39, 40, 41, 42, 43, 44, 45, 46, 47, 48, 49, 50, 51, 52, 53, 54, 55, 56, 57, 58, 59, 60, 61, 62, 63, 64, 65, 66, 67, 68, 69, 70, 71, 72, 73, 74, 75, 76, 77, 78, 79, 80, 81, 82, 83, 84, 85, 86, 87, 88, 89, 90, 91, 92, 93, 94, 95, 96, 97, 98, 99, 100, 101, 102, 103, 104, 105, 106, 107, 108, 109, 110, 111, 112, 113, 114, 115, 116, 117, 577, 579, 581, 583, 585, 587, 589, 591, 593, 595, 597, 599, 601, 603, 605, 607, 609, 611, 613, 615, 617, 619, 621, 623, 625, or 627, a variant, derivative, orthologue, paralogue or homologue thereof, in which:

[0844] the amino acid at Mutated site 4 is Ile, and the amino acid at Mutated site 5 is Asn.

[0845] In another preferred embodiment, the mutated PPO comprises a sequence of SEQ ID NO: 1, 2, 3, 4, 5, 6, 7, 8, 9, 10, 11, 12, 13, 14, 15, 16, 17, 18, 19, 20, 21, 22, 23, 24, 25, 26, 27, 28, 29, 30, 31, 32, 33, 34, 35, 36, 37, 38, 39, 40, 41, 42, 43, 44, 45, 46, 47, 48, 49, 50, 51, 52, 53, 54, 55, 56, 57, 58, 59, 60, 61, 62, 63, 64, 65, 66, 67, 68, 69, 70, 71, 72, 73, 74, 75, 76, 77, 78, 79, 80, 81, 82, 83, 84, 85, 86, 87, 88, 89, 90, 91, 92, 93, 94, 95, 96, 97, 98, 99, 100, 101, 102, 103, 104, 105, 106, 107, 108, 109, 110, 111, 112, 113, 114, 115, 116, 117, 577, 579, 581, 583, 585, 587, 589, 591, 593, 595, 597, 599, 601, 603, 605, 607, 609, 611, 613, 615, 617, 619, 621, 623, 625, or 627, a variant, derivative, orthologue, paralogue or homologue thereof, in which:

[0846] the amino acid at Mutated site 4 is Ile, and the amino acid at Mutated site 5 is Gln.

[0847] In another preferred embodiment, the mutated PPO comprises a sequence of SEQ ID NO: 1, 2, 3, 4, 5, 6, 7, 8, 9, 10, 11, 12, 13, 14, 15, 16, 17, 18, 19, 20, 21, 22, 23, 24, 25, 26, 27, 28, 29, 30, 31, 32, 33, 34, 35, 36, 37, 38, 39, 40, 41, 42, 43, 44, 45, 46, 47, 48, 49, 50, 51, 52, 53, 54, 55, 56, 57, 58, 59, 60, 61, 62, 63, 64, 65, 66, 67, 68, 69, 70, 71, 72, 73, 74, 75, 76, 77, 78, 79, 80, 81, 82, 83, 84, 85, 86, 87, 88, 89, 90, 91, 92, 93, 94, 95, 96, 97, 98, 99, 100, 101, 102, 103, 104, 105, 106, 107, 108, 109, 110, 111, 112, 113, 114, 115, 116, 117, 577, 579, 581, 583, 585, 587, 589, 591, 593, 595, 597, 599, 601, 603, 605, 607, 609, 611, 613, 615, 617, 619, 621, 623, 625, or 627, a variant, derivative, orthologue, paralogue or homologue thereof, in which:

[0848] the amino acid at Mutated site 4 is Ile, and the amino acid at Mutated site 5 is Cys.

[0849] In another preferred embodiment, the mutated PPO comprises a sequence of SEQ ID NO: 1, 2, 3, 4, 5, 6, 7, 8, 9, 10, 11, 12, 13, 14, 15, 16, 17, 18, 19, 20, 21, 22, 23, 24, 25, 26, 27, 28, 29, 30, 31, 32, 33, 34, 35, 36, 37, 38, 39, 40, 41, 42, 43, 44, 45, 46, 47, 48, 49, 50, 51, 52, 53, 54, 55, 56, 57, 58, 59, 60, 61, 62, 63, 64, 65, 66, 67, 68, 69, 70, 71, 72, 73, 74, 75, 76, 77, 78, 79, 80, 81, 82, 83, 84, 85, 86, 87, 88, 89, 90, 91, 92, 93, 94, 95, 96, 97, 98, 99, 100, 101, 102, 103, 104, 105, 106, 107, 108, 109, 110, 111, 112, 113, 114, 115, 116, 117, 577, 579, 581, 583, 585, 587, 589, 591, 593, 595, 597, 599, 601, 603, 605, 607, 609, 611, 613, 615, 617, 619, 621, 623, 625, or 627, a variant, derivative, orthologue, paralogue or homologue thereof, in which:

[0850] the amino acid at Mutated site 4 is Ile, and the amino acid at Mutated site 5 is Gly.

[0851] In another preferred embodiment, the mutated PPO comprises a sequence of SEQ ID NO: 1, 2, 3, 4, 5, 6, 7, 8, 9, 10, 11, 12, 13, 14, 15, 16, 17, 18, 19, 20, 21, 22, 23, 24, 25, 26, 27, 28, 29, 30, 31, 32, 33, 34, 35, 36, 37, 38, 39, 40, 41, 42, 43, 44, 45, 46, 47, 48, 49, 50, 51, 52, 53, 54, 55, 56, 57, 58, 59, 60, 61, 62, 63, 64, 65, 66, 67, 68, 69, 70, 71, 72, 73, 74, 75, 76, 77, 78, 79, 80, 81, 82, 83, 84, 85, 86, 87, 88, 89, 90, 91, 92, 93, 94, 95, 96, 97, 98, 99, 100, 101, 102, 103, 104, 105, 106, 107, 108, 109, 110, 111, 112, 113, 114, 115, 116, 117, 577, 579, 581, 583, 585, 587, 589, 591, 593, 595, 597, 599, 601, 603, 605, 607, 609, 611, 613, 615, 617, 619, 621, 623, 625, or 627, a variant, derivative, orthologue, paralogue or homologue thereof, in which:

[0852] the amino acid at Mutated site 4 is Ile, and the amino acid at Mutated site 5 is Pro.

[0853] In another preferred embodiment, the mutated PPO comprises a sequence of SEQ ID NO: 1, 2, 3, 4, 5, 6, 7, 8, 9, 10, 11, 12, 13, 14, 15, 16, 17, 18, 19, 20, 21, 22, 23, 24, 25, 26, 27, 28, 29, 30, 31, 32, 33, 34, 35, 36, 37, 38, 39, 40, 41, 42, 43, 44, 45, 46, 47, 48, 49, 50, 51, 52, 53, 54, 55, 56, 57, 58, 59, 60, 61, 62, 63, 64, 65, 66, 67, 68, 69, 70, 71, 72, 73, 74, 75, 76, 77, 78, 79, 80, 81, 82, 83, 84, 85, 86, 87, 88, 89, 90, 91, 92, 93, 94, 95, 96, 97, 98, 99, 100, 101, 102, 103, 104, 105, 106, 107, 108, 109, 110, 111, 112, 113, 114, 115, 116, 117, 577, 579, 581, 583, 585, 587, 589, 591, 593, 595, 597, 599, 601, 603, 605, 607, 609, 611, 613, 615, 617, 619, 621, 623, 625, or 627, a variant, derivative, orthologue, paralogue or homologue thereof, in which:

[0854] the amino acid at Mutated site 4 is Ile, and the amino acid at Mutated site 5 is Arg.

[0855] In another preferred embodiment, the mutated PPO comprises a sequence of SEQ ID NO: 1, 2, 3, 4, 5, 6, 7, 8, 9, 10, 11, 12, 13, 14, 15, 16, 17, 18, 19, 20, 21, 22, 23, 24, 25, 26, 27, 28, 29, 30, 31, 32, 33, 34, 35, 36, 37, 38, 39, 40, 41, 42, 43, 44, 45, 46, 47, 48, 49, 50, 51, 52, 53, 54, 55, 56, 57, 58, 59, 60, 61, 62, 63, 64, 65, 66, 67, 68, 69, 70, 71, 72, 73, 74, 75, 76, 77, 78, 79, 80, 81, 82, 83, 84, 85, 86, 87, 88, 89, 90, 91, 92, 93, 94, 95, 96, 97, 98, 99, 100, 101, 102, 103, 104, 105, 106, 107, 108, 109, 110, 111, 112, 113, 114, 115, 116, 117, 577, 579, 581, 583, 585, 587, 589, 591, 593, 595, 597, 599, 601, 603, 605, 607, 609, 611, 613, 615, 617, 619, 621, 623, 625, or 627, a variant, derivative, orthologue, paralogue or homologue thereof, in which:

[0856] the amino acid at Mutated site 4 is Ile, and the amino acid at Mutated site 5 is Tyr.

[0857] In another preferred embodiment, the mutated PPO comprises a sequence of SEQ ID NO: 1, 2, 3, 4, 5, 6, 7, 8, 9, 10, 11, 12, 13, 14, 15, 16, 17, 18, 19, 20, 21, 22, 23, 24, 25, 26, 27, 28, 29, 30, 31, 32, 33, 34, 35, 36, 37, 38, 39, 40, 41, 42, 43, 44, 45, 46, 47, 48, 49, 50, 51, 52, 53, 54, 55, 56, 57, 58, 59, 60, 61, 62, 63, 64, 65, 66, 67, 68, 69, 70, 71, 72, 73, 74, 75, 76, 77, 78, 79, 80, 81, 82, 83, 84, 85, 86, 87, 88, 89, 90, 91, 92, 93, 94, 95, 96, 97, 98, 99, 100, 101, 102, 103, 104, 105, 106, 107, 108, 109, 110, 111, 112, 113, 114, 115, 116, 117, 577, 579, 581, 583, 585, 587, 589, 591, 593, 595, 597, 599, 601, 603, 605, 607, 609, 611, 613, 615, 617, 619, 621, 623, 625, or 627, a variant, derivative, orthologue, paralogue or homologue thereof, in which:

[0858] the amino acid at Mutated site 4 is Ile, and the amino acid at Mutated site 5 is Trp.

[0859] In another preferred embodiment, the mutated PPO comprises a sequence of SEQ ID NO: 1, 2, 3, 4, 5, 6, 7, 8, 9, 10, 11, 12, 13, 14, 15, 16, 17, 18, 19, 20, 21, 22, 23, 24, 25, 26, 27, 28, 29, 30, 31, 32, 33, 34, 35, 36, 37, 38, 39, 40, 41, 42, 43, 44, 45, 46, 47, 48, 49, 50, 51, 52, 53, 54, 55, 56, 57, 58, 59, 60, 61, 62, 63, 64, 65, 66, 67, 68, 69, 70, 71, 72, 73, 74, 75, 76, 77, 78, 79, 80, 81, 82, 83, 84, 85, 86, 87, 88, 89, 90, 91, 92, 93, 94, 95, 96, 97, 98, 99, 100, 101, 102, 103, 104, 105, 106, 107, 108, 109, 110, 111, 112, 113, 114, 115, 116, 117, 577, 579, 581, 583, 585, 587, 589, 591, 593, 595, 597, 599, 601, 603, 605, 607, 609, 611, 613, 615, 617, 619, 621, 623, 625, or 627, a variant, derivative, orthologue, paralogue or homologue thereof, in which:

[0860] the amino acid at Mutated site 4 is Met, and the amino acid at Mutated site 5 is Ala.

[0861] In another preferred embodiment, the mutated PPO comprises a sequence of SEQ ID NO: 1, 2, 3, 4, 5, 6, 7, 8, 9, 10, 11, 12, 13, 14, 15, 16, 17, 18, 19, 20, 21, 22, 23, 24, 25, 26, 27, 28, 29, 30, 31, 32, 33, 34, 35, 36, 37, 38, 39, 40, 41, 42, 43, 44, 45, 46, 47, 48, 49, 50, 51, 52, 53, 54, 55, 56, 57, 58, 59, 60, 61, 62, 63, 64, 65, 66, 67, 68, 69, 70, 71, 72, 73, 74, 75, 76, 77, 78, 79, 80, 81, 82, 83, 84, 85, 86, 87, 88, 89, 90, 91, 92, 93, 94, 95, 96, 97, 98, 99, 100, 101, 102, 103, 104, 105, 106, 107, 108, 109, 110, 111, 112, 113, 114, 115, 116, 117, 577, 579, 581, 583, 585, 587, 589, 591, 593, 595, 597, 599, 601, 603, 605, 607, 609, 611, 613, 615, 617, 619, 621, 623, 625, or 627, a variant, derivative, orthologue, paralogue or homologue thereof, in which:

[0862] the amino acid at Mutated site 4 is Met, and the amino acid at Mutated site 5 is Leu.

[0863] In another preferred embodiment, the mutated PPO comprises a sequence of SEQ ID NO: 1, 2, 3, 4, 5, 6, 7, 8, 9, 10, 11, 12, 13, 14, 15, 16, 17, 18, 19, 20, 21, 22, 23, 24, 25, 26, 27, 28, 29, 30, 31, 32, 33, 34, 35, 36, 37, 38, 39, 40, 41, 42, 43, 44, 45, 46, 47, 48, 49, 50, 51, 52, 53, 54, 55, 56, 57, 58, 59, 60, 61, 62, 63, 64, 65, 66, 67, 68, 69, 70, 71, 72, 73, 74, 75, 76, 77, 78, 79, 80, 81, 82, 83, 84, 85, 86, 87, 88, 89, 90, 91, 92, 93, 94, 95, 96, 97, 98, 99, 100, 101, 102, 103, 104, 105, 106, 107, 108, 109, 110, 111, 112, 113, 114, 115, 116, 117, 577, 579, 581, 583, 585, 587, 589, 591, 593, 595, 597, 599, 601, 603, 605, 607, 609, 611, 613, 615, 617, 619, 621, 623, 625, or 627, a variant, derivative, orthologue, paralogue or homologue thereof, in which:

[0864] the amino acid at Mutated site 4 is Met, and the amino acid at Mutated site 5 is Val.

[0865] In another preferred embodiment, the mutated PPO comprises a sequence of SEQ ID NO: 1, 2, 3, 4, 5, 6, 7, 8, 9, 10, 11, 12, 13, 14, 15, 16, 17, 18, 19, 20, 21, 22, 23, 24, 25, 26, 27, 28, 29, 30, 31, 32, 33, 34, 35, 36, 37, 38, 39, 40, 41, 42, 43, 44, 45, 46, 47, 48, 49, 50, 51, 52, 53, 54, 55, 56, 57, 58, 59, 60, 61, 62, 63, 64, 65, 66, 67, 68, 69, 70, 71, 72, 73, 74, 75, 76, 77, 78, 79, 80, 81, 82, 83, 84, 85, 86, 87, 88, 89, 90, 91, 92, 93, 94, 95, 96, 97, 98, 99, 100, 101, 102, 103, 104, 105, 106, 107, 108, 109, 110, 111, 112, 113, 114, 115, 116, 117, 577, 579, 581, 583, 585, 587, 589, 591, 593, 595, 597, 599, 601, 603, 605, 607, 609, 611, 613, 615, 617, 619, 621, 623, 625, or 627, a variant, derivative, orthologue, paralogue or homologue thereof, in which:

[0866] the amino acid at Mutated site 4 is Met, and the amino acid at Mutated site 5 is Ile.

[0867] In another preferred embodiment, the mutated PPO comprises a sequence of SEQ ID NO: 1, 2, 3, 4, 5, 6, 7, 8, 9, 10, 11, 12, 13, 14, 15, 16, 17, 18, 19, 20, 21, 22, 23, 24, 25, 26, 27, 28, 29, 30, 31, 32, 33, 34, 35, 36, 37, 38, 39, 40, 41, 42, 43, 44, 45, 46, 47, 48, 49, 50, 51, 52, 53, 54, 55, 56, 57, 58, 59, 60, 61, 62, 63, 64, 65, 66, 67, 68, 69, 70, 71, 72, 73, 74, 75, 76, 77, 78, 79, 80, 81, 82, 83, 84, 85, 86, 87, 88, 89, 90, 91, 92, 93, 94, 95, 96, 97, 98, 99, 100, 101, 102, 103, 104, 105, 106, 107, 108, 109, 110, 111, 112, 113, 114, 115, 116, 117, 577, 579, 581, 583, 585, 587, 589, 591, 593, 595, 597, 599, 601, 603, 605, 607, 609, 611, 613, 615, 617, 619, 621, 623, 625, or 627, a variant, derivative, orthologue, paralogue or homologue thereof, in which:

[0868] the amino acid at Mutated site 4 is Met, and the amino acid at Mutated site 5 is Met.

[0869] In another preferred embodiment, the mutated PPO comprises a sequence of SEQ ID NO: 1, 2, 3, 4, 5, 6, 7, 8, 9, 10, 11, 12, 13, 14, 15, 16, 17, 18, 19, 20, 21, 22, 23, 24, 25, 26, 27, 28, 29, 30, 31, 32, 33, 34, 35, 36, 37, 38, 39, 40, 41, 42, 43, 44, 45, 46, 47, 48, 49, 50, 51, 52, 53, 54, 55, 56, 57, 58, 59, 60, 61, 62, 63, 64, 65, 66, 67, 68, 69, 70, 71, 72, 73, 74, 75, 76, 77, 78, 79, 80, 81, 82, 83, 84, 85, 86, 87, 88, 89, 90, 91, 92, 93, 94, 95, 96, 97, 98, 99, 100, 101, 102, 103, 104, 105, 106, 107, 108, 109, 110, 111, 112, 113, 114, 115, 116, 117, 577, 579, 581, 583, 585, 587, 589, 591, 593, 595, 597, 599, 601, 603, 605, 607, 609, 611, 613, 615, 617, 619, 621, 623, 625, or 627, a variant, derivative, orthologue, paralogue or homologue thereof, in which:

[0870] the amino acid at Mutated site 4 is Met, and the amino acid at Mutated site 5 is His.

[0871] In another preferred embodiment, the mutated PPO comprises a sequence of SEQ ID NO: 1, 2, 3, 4, 5, 6, 7, 8, 9, 10, 11, 12, 13, 14, 15, 16, 17, 18, 19, 20, 21, 22, 23, 24, 25, 26, 27, 28, 29, 30, 31, 32, 33, 34, 35, 36, 37, 38, 39, 40, 41, 42, 43, 44, 45, 46, 47, 48, 49, 50, 51, 52, 53, 54, 55, 56, 57, 58, 59, 60, 61, 62, 63, 64, 65, 66, 67, 68, 69, 70, 71, 72, 73, 74, 75, 76, 77, 78, 79, 80, 81, 82, 83, 84, 85, 86, 87, 88, 89, 90, 91, 92, 93, 94, 95, 96, 97, 98, 99, 100, 101, 102, 103, 104, 105, 106, 107, 108, 109, 110, 111, 112, 113, 114, 115, 116, 117, 577, 579, 581, 583, 585, 587, 589, 591, 593, 595, 597, 599, 601, 603, 605, 607, 609, 611, 613, 615, 617, 619, 621, 623, 625, or 627, a variant, derivative, orthologue, paralogue or homologue thereof, in which:

[0872] the amino acid at Mutated site 4 is Met, and the amino acid at Mutated site 5 is Lys.

[0873] In another preferred embodiment, the mutated PPO comprises a sequence of SEQ ID NO: 1, 2, 3, 4, 5, 6, 7, 8, 9, 10, 11, 12, 13, 14, 15, 16, 17, 18, 19, 20, 21, 22, 23, 24, 25, 26, 27, 28, 29, 30, 31, 32, 33, 34, 35, 36, 37, 38, 39, 40, 41, 42, 43, 44, 45, 46, 47, 48, 49, 50, 51, 52, 53, 54, 55, 56, 57, 58, 59, 60, 61, 62, 63, 64, 65, 66, 67, 68, 69, 70, 71, 72, 73, 74, 75, 76, 77, 78, 79, 80, 81, 82, 83, 84, 85, 86, 87, 88, 89, 90, 91, 92, 93, 94, 95, 96, 97, 98, 99, 100, 101, 102, 103, 104, 105, 106, 107, 108, 109, 110, 111, 112, 113, 114, 115, 116, 117, 577, 579, 581, 583, 585, 587, 589, 591, 593, 595, 597, 599, 601, 603, 605, 607, 609, 611, 613, 615, 617, 619, 621, 623, 625, or 627, a variant, derivative, orthologue, paralogue or homologue thereof, in which:

[0874] the amino acid at Mutated site 4 is Met, and the amino acid at Mutated site 5 is Asp.

[0875] In another preferred embodiment, the mutated PPO comprises a sequence of SEQ ID NO: 1, 2, 3, 4, 5, 6, 7, 8, 9, 10, 11, 12, 13, 14, 15, 16, 17, 18, 19, 20, 21, 22, 23, 24, 25, 26, 27, 28, 29, 30, 31, 32, 33, 34, 35, 36, 37, 38, 39, 40, 41, 42, 43, 44, 45, 46, 47, 48, 49, 50, 51, 52, 53, 54, 55, 56, 57, 58, 59, 60, 61, 62, 63, 64, 65, 66, 67, 68, 69, 70, 71, 72, 73, 74, 75, 76, 77, 78, 79, 80, 81, 82, 83, 84, 85, 86, 87, 88, 89, 90, 91, 92, 93, 94, 95, 96, 97, 98, 99, 100, 101, 102, 103, 104, 105, 106, 107, 108, 109, 110, 111, 112, 113, 114, 115, 116, 117, 577, 579, 581, 583, 585, 587, 589, 591, 593, 595, 597, 599, 601, 603, 605, 607, 609, 611, 613, 615, 617, 619, 621, 623, 625, or 627, a variant, derivative, orthologue, paralogue or homologue thereof, in which:

[0876] the amino acid at Mutated site 4 is Met, and the amino acid at Mutated site 5 is Glu.

[0877] In another preferred embodiment, the mutated PPO comprises a sequence of SEQ ID NO: 1, 2, 3, 4, 5, 6, 7, 8, 9, 10, 11, 12, 13, 14, 15, 16, 17, 18, 19, 20, 21, 22, 23, 24, 25, 26, 27, 28, 29, 30, 31, 32, 33, 34, 35, 36, 37, 38, 39, 40, 41, 42, 43, 44, 45, 46, 47, 48, 49, 50, 51, 52, 53, 54, 55, 56, 57, 58, 59, 60, 61, 62, 63, 64, 65, 66, 67, 68, 69, 70, 71, 72, 73, 74, 75, 76, 77, 78, 79, 80, 81, 82, 83, 84, 85, 86, 87, 88, 89, 90, 91, 92, 93, 94, 95, 96, 97, 98, 99, 100, 101, 102, 103, 104, 105, 106, 107, 108, 109, 110, 111, 112, 113, 114, 115, 116, 117, 577, 579, 581, 583, 585, 587, 589, 591, 593, 595, 597, 599, 601, 603, 605, 607, 609, 611, 613, 615, 617, 619, 621, 623, 625, or 627, a variant, derivative, orthologue, paralogue or homologue thereof, in which:

[0878] the amino acid at Mutated site 4 is Met, and the amino acid at Mutated site 5 is Ser.

[0879] In another preferred embodiment, the mutated PPO comprises a sequence of SEQ ID NO: 1, 2, 3, 4, 5, 6, 7, 8, 9, 10, 11, 12, 13, 14, 15, 16, 17, 18, 19, 20, 21, 22, 23, 24, 25, 26, 27, 28, 29, 30, 31, 32, 33, 34, 35, 36, 37, 38, 39, 40, 41, 42, 43, 44, 45, 46, 47, 48, 49, 50, 51, 52, 53, 54, 55, 56, 57, 58, 59, 60, 61, 62, 63, 64, 65, 66, 67, 68, 69, 70, 71, 72, 73, 74, 75, 76, 77, 78, 79, 80, 81, 82, 83, 84, 85, 86, 87, 88, 89, 90, 91, 92, 93, 94, 95, 96, 97, 98, 99, 100, 101, 102, 103, 104, 105, 106, 107, 108, 109, 110, 111, 112, 113, 114, 115, 116, 117, 577, 579, 581, 583, 585, 587, 589, 591, 593, 595, 597, 599, 601, 603, 605, 607, 609, 611, 613, 615, 617, 619, 621, 623, 625, or 627, a variant, derivative, orthologue, paralogue or homologue thereof, in which:

[0880] the amino acid at Mutated site 4 is Met, and the amino acid at Mutated site 5 is Thr.

[0881] In another preferred embodiment, the mutated PPO comprises a sequence of SEQ ID NO: 1, 2, 3, 4, 5, 6, 7, 8, 9, 10, 11, 12, 13, 14, 15, 16, 17, 18, 19, 20, 21, 22, 23, 24, 25, 26, 27, 28, 29, 30, 31, 32, 33, 34, 35, 36, 37, 38, 39, 40, 41, 42, 43, 44, 45, 46, 47, 48, 49, 50, 51, 52, 53, 54, 55, 56, 57, 58, 59, 60, 61, 62, 63, 64, 65, 66, 67, 68, 69, 70, 71, 72, 73, 74, 75, 76, 77, 78, 79, 80, 81, 82, 83, 84, 85, 86, 87, 88, 89, 90, 91, 92, 93, 94, 95, 96, 97, 98, 99, 100, 101, 102, 103, 104, 105, 106, 107, 108, 109, 110, 111, 112, 113, 114, 115, 116, 117, 577, 579, 581, 583, 585, 587, 589, 591, 593, 595, 597, 599, 601, 603, 605, 607, 609, 611, 613, 615, 617, 619, 621, 623, 625, or 627, a variant, derivative, orthologue, paralogue or homologue thereof, in which:

[0882] the amino acid at Mutated site 4 is Met, and the amino acid at Mutated site 5 is Asn.

[0883] In another preferred embodiment, the mutated PPO comprises a sequence of SEQ ID NO: 1, 2, 3, 4, 5, 6, 7, 8, 9, 10, 11, 12, 13, 14, 15, 16, 17, 18, 19, 20, 21, 22, 23, 24, 25, 26, 27, 28, 29, 30, 31, 32, 33, 34, 35, 36, 37, 38, 39, 40, 41, 42, 43, 44, 45, 46, 47, 48, 49, 50, 51, 52, 53, 54, 55, 56, 57, 58, 59, 60, 61, 62, 63, 64, 65, 66, 67, 68, 69, 70, 71, 72, 73, 74, 75, 76, 77, 78, 79, 80, 81, 82, 83, 84, 85, 86, 87, 88, 89, 90, 91, 92, 93, 94, 95, 96, 97, 98, 99, 100, 101, 102, 103, 104, 105, 106, 107, 108, 109, 110, 111, 112, 113, 114, 115, 116, 117, 577, 579, 581, 583, 585, 587, 589, 591, 593, 595, 597, 599, 601, 603, 605, 607, 609, 611, 613, 615, 617, 619, 621, 623, 625, or 627, a variant, derivative, orthologue, paralogue or homologue thereof, in which:

[0884] the amino acid at Mutated site 4 is Met, and the amino acid at Mutated site 5 is Gln.

[0885] In another preferred embodiment, the mutated PPO comprises a sequence of SEQ ID NO: 1, 2, 3, 4, 5, 6, 7, 8, 9, 10, 11, 12, 13, 14, 15, 16, 17, 18, 19, 20, 21, 22, 23, 24, 25, 26, 27, 28, 29, 30, 31, 32, 33, 34, 35, 36, 37, 38, 39, 40, 41, 42, 43, 44, 45, 46, 47, 48, 49, 50, 51, 52, 53, 54, 55, 56, 57, 58, 59, 60, 61, 62, 63, 64, 65, 66, 67, 68, 69, 70, 71, 72, 73, 74, 75, 76, 77, 78, 79, 80, 81, 82, 83, 84, 85, 86, 87, 88, 89, 90, 91, 92, 93, 94, 95, 96, 97, 98, 99, 100, 101, 102, 103, 104, 105, 106, 107, 108, 109, 110, 111, 112, 113, 114, 115, 116, 117, 577, 579, 581, 583, 585, 587, 589, 591, 593, 595, 597, 599, 601, 603, 605, 607, 609, 611, 613, 615, 617, 619, 621, 623, 625, or 627, a variant, derivative, orthologue, paralogue or homologue thereof, in which:

[0886] the amino acid at Mutated site 4 is Met, and the amino acid at Mutated site 5 is Cys.

[0887] In another preferred embodiment, the mutated PPO comprises a sequence of SEQ ID NO: 1, 2, 3, 4, 5, 6, 7, 8, 9, 10, 11, 12, 13, 14, 15, 16, 17, 18, 19, 20, 21, 22, 23, 24, 25, 26, 27, 28, 29, 30, 31, 32, 33, 34, 35, 36, 37, 38, 39, 40, 41, 42, 43, 44, 45, 46, 47, 48, 49, 50, 51, 52, 53, 54, 55, 56, 57, 58, 59, 60, 61, 62, 63, 64, 65, 66, 67, 68, 69, 70, 71, 72, 73, 74, 75, 76, 77, 78, 79, 80, 81, 82, 83, 84, 85, 86, 87, 88, 89, 90, 91, 92, 93, 94, 95, 96, 97, 98, 99, 100, 101, 102, 103, 104, 105, 106, 107, 108, 109, 110, 111, 112, 113, 114, 115, 116, 117, 577, 579, 581, 583, 585, 587, 589, 591, 593, 595, 597, 599, 601, 603, 605, 607, 609, 611, 613, 615, 617, 619, 621, 623, 625, or 627, a variant, derivative, orthologue, paralogue or homologue thereof, in which:

[0888] the amino acid at Mutated site 4 is Met, and the amino acid at Mutated site 5 is Gly.

[0889] In another preferred embodiment, the mutated PPO comprises a sequence of SEQ ID NO: 1, 2, 3, 4, 5, 6, 7, 8, 9, 10, 11, 12, 13, 14, 15, 16, 17, 18, 19, 20, 21, 22, 23, 24, 25, 26, 27, 28, 29, 30, 31, 32, 33, 34, 35, 36, 37, 38, 39, 40, 41, 42, 43, 44, 45, 46, 47, 48, 49, 50, 51, 52, 53, 54, 55, 56, 57, 58, 59, 60, 61, 62, 63, 64, 65, 66, 67, 68, 69, 70, 71, 72, 73, 74, 75, 76, 77, 78, 79, 80, 81, 82, 83, 84, 85, 86, 87, 88, 89, 90, 91, 92, 93, 94, 95, 96, 97, 98, 99, 100, 101, 102, 103, 104, 105, 106, 107, 108, 109, 110, 111, 112, 113, 114, 115, 116, 117, 577, 579, 581, 583, 585, 587, 589, 591, 593, 595, 597, 599, 601, 603, 605, 607, 609, 611, 613, 615, 617, 619, 621, 623, 625, or 627, a variant, derivative, orthologue, paralogue or homologue thereof, in which:

[0890] the amino acid at Mutated site 4 is Met, and the amino acid at Mutated site 5 is Pro.

[0891] In another preferred embodiment, the mutated PPO comprises a sequence of SEQ ID NO: 1, 2, 3, 4, 5, 6, 7, 8, 9, 10, 11, 12, 13, 14, 15, 16, 17, 18, 19, 20, 21, 22, 23, 24, 25, 26, 27, 28, 29, 30, 31, 32, 33, 34, 35, 36, 37, 38, 39, 40, 41, 42, 43, 44, 45, 46, 47, 48, 49, 50, 51, 52, 53, 54, 55, 56, 57, 58, 59, 60, 61, 62, 63, 64, 65, 66, 67, 68, 69, 70, 71, 72, 73, 74, 75, 76, 77, 78, 79, 80, 81, 82, 83, 84, 85, 86, 87, 88, 89, 90, 91, 92, 93, 94, 95, 96, 97, 98, 99, 100, 101, 102, 103, 104, 105, 106, 107, 108, 109, 110, 111, 112, 113, 114, 115, 116, 117, 577, 579, 581, 583, 585, 587, 589, 591, 593, 595, 597, 599, 601, 603, 605, 607, 609, 611, 613, 615, 617, 619, 621, 623, 625, or 627, a variant, derivative, orthologue, paralogue or homologue thereof, in which:

[0892] the amino acid at Mutated site 4 is Met, and the amino acid at Mutated site 5 is Arg.

[0893] In another preferred embodiment, the mutated PPO comprises a sequence of SEQ ID NO: 1, 2, 3, 4, 5, 6, 7, 8, 9, 10, 11, 12, 13, 14, 15, 16, 17, 18, 19, 20, 21, 22, 23, 24, 25, 26, 27, 28, 29, 30, 31, 32, 33, 34, 35, 36, 37, 38, 39, 40, 41, 42, 43, 44, 45, 46, 47, 48, 49, 50, 51, 52, 53, 54, 55, 56, 57, 58, 59, 60, 61, 62, 63, 64, 65, 66, 67, 68, 69, 70, 71, 72, 73, 74, 75, 76, 77, 78, 79, 80, 81, 82, 83, 84, 85, 86, 87, 88, 89, 90, 91, 92, 93, 94, 95, 96, 97, 98, 99, 100, 101, 102, 103, 104, 105, 106, 107, 108, 109, 110, 111, 112, 113, 114, 115, 116, 117, 577, 579, 581, 583, 585, 587, 589, 591, 593, 595, 597, 599, 601, 603, 605, 607, 609, 611, 613, 615, 617, 619, 621, 623, 625, or 627, a variant, derivative, orthologue, paralogue or homologue thereof, in which:

[0894] the amino acid at Mutated site 4 is Met, and the amino acid at Mutated site 5 is Tyr.

[0895] In another preferred embodiment, the mutated PPO comprises a sequence of SEQ ID NO: 1, 2, 3, 4, 5, 6, 7, 8, 9, 10, 11, 12, 13, 14, 15, 16, 17, 18, 19, 20, 21, 22, 23, 24, 25, 26, 27, 28, 29, 30, 31, 32, 33, 34, 35, 36, 37, 38, 39, 40, 41, 42, 43, 44, 45, 46, 47, 48, 49, 50, 51, 52, 53, 54, 55, 56, 57, 58, 59, 60, 61, 62, 63, 64, 65, 66, 67, 68, 69, 70, 71, 72, 73, 74, 75, 76, 77, 78, 79, 80, 81, 82, 83, 84, 85, 86, 87, 88, 89, 90, 91, 92, 93, 94, 95, 96, 97, 98, 99, 100, 101, 102, 103, 104, 105, 106, 107, 108, 109, 110, 111, 112, 113, 114, 115, 116, 117, 577, 579, 581, 583, 585, 587, 589, 591, 593, 595, 597, 599, 601, 603, 605, 607, 609, 611, 613, 615, 617, 619, 621, 623, 625, or 627, a variant, derivative, orthologue, paralogue or homologue thereof, in which:

[0896] the amino acid at Mutated site 4 is Met, and the amino acid at Mutated site 5 is Trp.

[0897] In another preferred embodiment, the mutated PPO comprises a sequence of SEQ ID NO: 1, 2, 3, 4, 5, 6, 7, 8, 9, 10, 11, 12, 13, 14, 15, 16, 17, 18, 19, 20, 21, 22, 23, 24, 25, 26, 27, 28, 29, 30, 31, 32, 33, 34, 35, 36, 37, 38, 39, 40, 41, 42, 43, 44, 45, 46, 47, 48, 49, 50, 51, 52, 53, 54, 55, 56, 57, 58, 59, 60, 61, 62, 63, 64, 65, 66, 67, 68, 69, 70, 71, 72, 73, 74, 75, 76, 77, 78, 79, 80, 81, 82, 83, 84, 85, 86, 87, 88, 89, 90, 91, 92, 93, 94, 95, 96, 97, 98, 99, 100, 101, 102, 103, 104, 105, 106, 107, 108, 109, 110, 111, 112, 113, 114, 115, 116, 117, 577, 579, 581, 583, 585, 587, 589, 591, 593, 595, 597, 599, 601, 603, 605, 607, 609, 611, 613, 615, 617, 619, 621, 623, 625, or 627, a variant, derivative, orthologue, paralogue or homologue thereof, in which:

[0898] the amino acid at Mutated site 4 is His, and the amino acid at Mutated site 5 is Ala.

[0899] In another preferred embodiment, the mutated PPO comprises a sequence of SEQ ID NO: 1, 2, 3, 4, 5, 6, 7, 8, 9, 10, 11, 12, 13, 14, 15, 16, 17, 18, 19, 20, 21, 22, 23, 24, 25, 26, 27, 28, 29, 30, 31, 32, 33, 34, 35, 36, 37, 38, 39, 40, 41, 42, 43, 44, 45, 46, 47, 48, 49, 50, 51, 52, 53, 54, 55, 56, 57, 58, 59, 60, 61, 62, 63, 64, 65, 66, 67, 68, 69, 70, 71, 72, 73, 74, 75, 76, 77, 78, 79, 80, 81, 82, 83, 84, 85, 86, 87, 88, 89, 90, 91, 92, 93, 94, 95, 96, 97, 98, 99, 100, 101, 102, 103, 104, 105, 106, 107, 108, 109, 110, 111, 112, 113, 114, 115, 116, 117, 577, 579, 581, 583, 585, 587, 589, 591, 593, 595, 597, 599, 601, 603, 605, 607, 609, 611, 613, 615, 617, 619, 621, 623, 625, or 627, a variant, derivative, orthologue, paralogue or homologue thereof, in which:

[0900] the amino acid at Mutated site 4 is His, and the amino acid at Mutated site 5 is Leu.

[0901] In another preferred embodiment, the mutated PPO comprises a sequence of SEQ ID NO: 1, 2, 3, 4, 5, 6, 7, 8, 9, 10, 11, 12, 13, 14, 15, 16, 17, 18, 19, 20, 21, 22, 23, 24, 25, 26, 27, 28, 29, 30, 31, 32, 33, 34, 35, 36, 37, 38, 39, 40, 41, 42, 43, 44, 45, 46, 47, 48, 49, 50, 51, 52, 53, 54, 55, 56, 57, 58, 59, 60, 61, 62, 63, 64, 65, 66, 67, 68, 69, 70, 71, 72, 73, 74, 75, 76, 77, 78, 79, 80, 81, 82, 83, 84, 85, 86, 87, 88, 89, 90, 91, 92, 93, 94, 95, 96, 97, 98, 99, 100, 101, 102, 103, 104, 105, 106, 107, 108, 109, 110, 111, 112, 113, 114, 115, 116, 117, 577, 579, 581, 583, 585, 587, 589, 591, 593, 595, 597, 599, 601, 603, 605, 607, 609, 611, 613, 615, 617, 619, 621, 623, 625, or 627, a variant, derivative, orthologue, paralogue or homologue thereof, in which:

[0902] the amino acid at Mutated site 4 is His, and the amino acid at Mutated site 5 is Val.

[0903] In another preferred embodiment, the mutated PPO comprises a sequence of SEQ ID NO: 1, 2, 3, 4, 5, 6, 7, 8, 9, 10, 11, 12, 13, 14, 15, 16, 17, 18, 19, 20, 21, 22, 23, 24, 25, 26, 27, 28, 29, 30, 31, 32, 33, 34, 35, 36, 37, 38, 39, 40, 41, 42, 43, 44, 45, 46, 47, 48, 49, 50, 51, 52, 53, 54, 55, 56, 57, 58, 59, 60, 61, 62, 63, 64, 65, 66, 67, 68, 69, 70, 71, 72, 73, 74, 75, 76, 77, 78, 79, 80, 81, 82, 83, 84, 85, 86, 87, 88, 89, 90, 91, 92, 93, 94, 95, 96, 97, 98, 99, 100, 101, 102, 103, 104, 105, 106, 107, 108, 109, 110, 111, 112, 113, 114, 115, 116, 117, 577, 579, 581, 583, 585, 587, 589, 591, 593, 595, 597, 599, 601, 603, 605, 607, 609, 611, 613, 615, 617, 619, 621, 623, 625, or 627, a variant, derivative, orthologue, paralogue or homologue thereof, in which:

[0904] the amino acid at Mutated site 4 is His, and the amino acid at Mutated site 5 is Ile.

[0905] In another preferred embodiment, the mutated PPO comprises a sequence of SEQ ID NO: 1, 2, 3, 4, 5, 6, 7, 8, 9, 10, 11, 12, 13, 14, 15, 16, 17, 18, 19, 20, 21, 22, 23, 24, 25, 26, 27, 28, 29, 30, 31, 32, 33, 34, 35, 36, 37, 38, 39, 40, 41, 42, 43, 44, 45, 46, 47, 48, 49, 50, 51, 52, 53, 54, 55, 56, 57, 58, 59, 60, 61, 62, 63, 64, 65, 66, 67, 68, 69, 70, 71, 72, 73, 74, 75, 76, 77, 78, 79, 80, 81, 82, 83, 84, 85, 86, 87, 88, 89, 90, 91, 92, 93, 94, 95, 96, 97, 98, 99, 100, 101, 102, 103, 104, 105, 106, 107, 108, 109, 110, 111, 112, 113, 114, 115, 116, 117, 577, 579, 581, 583, 585, 587, 589, 591, 593, 595, 597, 599, 601, 603, 605, 607, 609, 611, 613, 615, 617, 619, 621, 623, 625, or 627, a variant, derivative, orthologue, paralogue or homologue thereof, in which:

[0906] the amino acid at Mutated site 4 is His, and the amino acid at Mutated site 5 is Met.

[0907] In another preferred embodiment, the mutated PPO comprises a sequence of SEQ ID NO: 1, 2, 3, 4, 5, 6, 7, 8, 9, 10, 11, 12, 13, 14, 15, 16, 17, 18, 19, 20, 21, 22, 23, 24, 25, 26, 27, 28, 29, 30, 31, 32, 33, 34, 35, 36, 37, 38, 39, 40, 41, 42, 43, 44, 45, 46, 47, 48, 49, 50, 51, 52, 53, 54, 55, 56, 57, 58, 59, 60, 61, 62, 63, 64, 65, 66, 67, 68, 69, 70, 71, 72, 73, 74, 75, 76, 77, 78, 79, 80, 81, 82, 83, 84, 85, 86, 87, 88, 89, 90, 91, 92, 93, 94, 95, 96, 97, 98, 99, 100, 101, 102, 103, 104, 105, 106, 107, 108, 109, 110, 111, 112, 113, 114, 115, 116, 117, 577, 579, 581, 583, 585, 587, 589, 591, 593, 595, 597, 599, 601, 603, 605, 607, 609, 611, 613, 615, 617, 619, 621, 623, 625, or 627, a variant, derivative, orthologue, paralogue or homologue thereof, in which:

[0908] the amino acid at Mutated site 4 is His, and the amino acid at Mutated site 5 is His.

[0909] In another preferred embodiment, the mutated PPO comprises a sequence of SEQ ID NO: 1, 2, 3, 4, 5, 6, 7, 8, 9, 10, 11, 12, 13, 14, 15, 16, 17, 18, 19, 20, 21, 22, 23, 24, 25, 26, 27, 28, 29, 30, 31, 32, 33, 34, 35, 36, 37, 38, 39, 40, 41, 42, 43, 44, 45, 46, 47, 48, 49, 50, 51, 52, 53, 54, 55, 56, 57, 58, 59, 60, 61, 62, 63, 64, 65, 66, 67, 68, 69, 70, 71, 72, 73, 74, 75, 76, 77, 78, 79, 80, 81, 82, 83, 84, 85, 86, 87, 88, 89, 90, 91, 92, 93, 94, 95, 96, 97, 98, 99, 100, 101, 102, 103, 104, 105, 106, 107, 108, 109, 110, 111, 112, 113, 114, 115, 116, 117, 577, 579, 581, 583, 585, 587, 589, 591, 593, 595, 597, 599, 601, 603, 605, 607, 609, 611, 613, 615, 617, 619, 621, 623, 625, or 627, a variant, derivative, orthologue, paralogue or homologue thereof, in which:

[0910] the amino acid at Mutated site 4 is His, and the amino acid at Mutated site 5 is Lys.

[0911] In another preferred embodiment, the mutated PPO comprises a sequence of SEQ ID NO: 1, 2, 3, 4, 5, 6, 7, 8, 9, 10, 11, 12, 13, 14, 15, 16, 17, 18, 19, 20, 21, 22, 23, 24, 25, 26, 27, 28, 29, 30, 31, 32, 33, 34, 35, 36, 37, 38, 39, 40, 41, 42, 43, 44, 45, 46, 47, 48, 49, 50, 51, 52, 53, 54, 55, 56, 57, 58, 59, 60, 61, 62, 63, 64, 65, 66, 67, 68, 69, 70, 71, 72, 73, 74, 75, 76, 77, 78, 79, 80, 81, 82, 83, 84, 85, 86, 87, 88, 89, 90, 91, 92, 93, 94, 95, 96, 97, 98, 99, 100, 101, 102, 103, 104, 105, 106, 107, 108, 109, 110, 111, 112, 113, 114, 115, 116, 117, 577, 579, 581, 583, 585, 587, 589, 591, 593, 595, 597, 599, 601, 603, 605, 607, 609, 611, 613, 615, 617, 619, 621, 623, 625, or 627, a variant, derivative, orthologue, paralogue or homologue thereof, in which:

[0912] the amino acid at Mutated site 4 is His, and the amino acid at Mutated site 5 is Asp.

[0913] In another preferred embodiment, the mutated PPO comprises a sequence of SEQ ID NO: 1, 2, 3, 4, 5, 6, 7, 8, 9, 10, 11, 12, 13, 14, 15, 16, 17, 18, 19, 20, 21, 22, 23, 24, 25, 26, 27, 28, 29, 30, 31, 32, 33, 34, 35, 36, 37, 38, 39, 40, 41, 42, 43, 44, 45, 46, 47, 48, 49, 50, 51, 52, 53, 54, 55, 56, 57, 58, 59, 60, 61, 62, 63, 64, 65, 66, 67, 68, 69, 70, 71, 72, 73, 74, 75, 76, 77, 78, 79, 80, 81, 82, 83, 84, 85, 86, 87, 88, 89, 90, 91, 92, 93, 94, 95, 96, 97, 98, 99, 100, 101, 102, 103, 104, 105, 106, 107, 108, 109, 110, 111, 112, 113, 114, 115, 116, 117, 577, 579, 581, 583, 585, 587, 589, 591, 593, 595, 597, 599, 601, 603, 605, 607, 609, 611, 613, 615, 617, 619, 621, 623, 625, or 627, a variant, derivative, orthologue, paralogue or homologue thereof, in which:

[0914] the amino acid at Mutated site 4 is His, and the amino acid at Mutated site 5 is Glu.

[0915] In another preferred embodiment, the mutated PPO comprises a sequence of SEQ ID NO: 1, 2, 3, 4, 5, 6, 7, 8, 9, 10, 11, 12, 13, 14, 15, 16, 17, 18, 19, 20, 21, 22, 23, 24, 25, 26, 27, 28, 29, 30, 31, 32, 33, 34, 35, 36, 37, 38, 39, 40, 41, 42, 43, 44, 45, 46, 47, 48, 49, 50, 51, 52, 53, 54, 55, 56, 57, 58, 59, 60, 61, 62, 63, 64, 65, 66, 67, 68, 69, 70, 71, 72, 73, 74, 75, 76, 77, 78, 79, 80, 81, 82, 83, 84, 85, 86, 87, 88, 89, 90, 91, 92, 93, 94, 95, 96, 97, 98, 99, 100, 101, 102, 103, 104, 105, 106, 107, 108, 109, 110, 111, 112, 113, 114, 115, 116, 117, 577, 579, 581, 583, 585, 587, 589, 591, 593, 595, 597, 599, 601, 603, 605, 607, 609, 611, 613, 615, 617, 619, 621, 623, 625, or 627, a variant, derivative, orthologue, paralogue or homologue thereof, in which:

[0916] the amino acid at Mutated site 4 is His, and the amino acid at Mutated site 5 is Ser.

[0917] In another preferred embodiment, the mutated PPO comprises a sequence of SEQ ID NO: 1, 2, 3, 4, 5, 6, 7, 8, 9, 10, 11, 12, 13, 14, 15, 16, 17, 18, 19, 20, 21, 22, 23, 24, 25, 26, 27, 28, 29, 30, 31, 32, 33, 34, 35, 36, 37, 38, 39, 40, 41, 42, 43, 44, 45, 46, 47, 48, 49, 50, 51, 52, 53, 54, 55, 56, 57, 58, 59, 60, 61, 62, 63, 64, 65, 66, 67, 68, 69, 70, 71, 72, 73, 74, 75, 76, 77, 78, 79, 80, 81, 82, 83, 84, 85, 86, 87, 88, 89, 90, 91, 92, 93, 94, 95, 96, 97, 98, 99, 100, 101, 102, 103, 104, 105, 106, 107, 108, 109, 110, 111, 112, 113, 114, 115, 116, 117, 577, 579, 581, 583, 585, 587, 589, 591, 593, 595, 597, 599, 601, 603, 605, 607, 609, 611, 613, 615, 617, 619, 621, 623, 625, or 627, a variant, derivative, orthologue, paralogue or homologue thereof, in which:

[0918] the amino acid at Mutated site 4 is His, and the amino acid at Mutated site 5 is Thr.

[0919] In another preferred embodiment, the mutated PPO comprises a sequence of SEQ ID NO: 1, 2, 3, 4, 5, 6, 7, 8, 9, 10, 11, 12, 13, 14, 15, 16, 17, 18, 19, 20, 21, 22, 23, 24, 25, 26, 27, 28, 29, 30, 31, 32, 33, 34, 35, 36, 37, 38, 39, 40, 41, 42, 43, 44, 45, 46, 47, 48, 49, 50, 51, 52, 53, 54, 55, 56, 57, 58, 59, 60, 61, 62, 63, 64, 65, 66, 67, 68, 69, 70, 71, 72, 73, 74, 75, 76, 77, 78, 79, 80, 81, 82, 83, 84, 85, 86, 87, 88, 89, 90, 91, 92, 93, 94, 95, 96, 97, 98, 99, 100, 101, 102, 103, 104, 105, 106, 107, 108, 109, 110, 111, 112, 113, 114, 115, 116, 117, 577, 579, 581, 583, 585, 587, 589, 591, 593, 595, 597, 599, 601, 603, 605, 607, 609, 611, 613, 615, 617, 619, 621, 623, 625, or 627, a variant, derivative, orthologue, paralogue or homologue thereof, in which:

[0920] the amino acid at Mutated site 4 is His, and the amino acid at Mutated site 5 is Asn.

[0921] In another preferred embodiment, the mutated PPO comprises a sequence of SEQ ID NO: 1, 2, 3, 4, 5, 6, 7, 8, 9, 10, 11, 12, 13, 14, 15, 16, 17, 18, 19, 20, 21, 22, 23, 24, 25, 26, 27, 28, 29, 30, 31, 32, 33, 34, 35, 36, 37, 38, 39, 40, 41, 42, 43, 44, 45, 46, 47, 48, 49, 50, 51, 52, 53, 54, 55, 56, 57, 58, 59, 60, 61, 62, 63, 64, 65, 66, 67, 68, 69, 70, 71, 72, 73, 74, 75, 76, 77, 78, 79, 80, 81, 82, 83, 84, 85, 86, 87, 88, 89, 90, 91, 92, 93, 94, 95, 96, 97, 98, 99, 100, 101, 102, 103, 104, 105, 106, 107, 108, 109, 110, 111, 112, 113, 114, 115, 116, 117, 577, 579, 581, 583, 585, 587, 589, 591, 593, 595, 597, 599, 601, 603, 605, 607, 609, 611, 613, 615, 617, 619, 621, 623, 625, or 627, a variant, derivative, orthologue, paralogue or homologue thereof, in which:

[0922] the amino acid at Mutated site 4 is His, and the amino acid at Mutated site 5 is Gln.

[0923] In another preferred embodiment, the mutated PPO comprises a sequence of SEQ ID NO: 1, 2, 3, 4, 5, 6, 7, 8, 9, 10, 11, 12, 13, 14, 15, 16, 17, 18, 19, 20, 21, 22, 23, 24, 25, 26, 27, 28, 29, 30, 31, 32, 33, 34, 35, 36, 37, 38, 39, 40, 41, 42, 43, 44, 45, 46, 47, 48, 49, 50, 51, 52, 53, 54, 55, 56, 57, 58, 59, 60, 61, 62, 63, 64, 65, 66, 67, 68, 69, 70, 71, 72, 73, 74, 75, 76, 77, 78, 79, 80, 81, 82, 83, 84, 85, 86, 87, 88, 89, 90, 91, 92, 93, 94, 95, 96, 97, 98, 99, 100, 101, 102, 103, 104, 105, 106, 107, 108, 109, 110, 111, 112, 113, 114, 115, 116, 117, 577, 579, 581, 583, 585, 587, 589, 591, 593, 595, 597, 599, 601, 603, 605, 607, 609, 611, 613, 615, 617, 619, 621, 623, 625, or 627, a variant, derivative, orthologue, paralogue or homologue thereof, in which:

[0924] the amino acid at Mutated site 4 is His, and the amino acid at Mutated site 5 is Cys.

[0925] In another preferred embodiment, the mutated PPO comprises a sequence of SEQ ID NO: 1, 2, 3, 4, 5, 6, 7, 8, 9, 10, 11, 12, 13, 14, 15, 16, 17, 18, 19, 20, 21, 22, 23, 24, 25, 26, 27, 28, 29, 30, 31, 32, 33, 34, 35, 36, 37, 38, 39, 40, 41, 42, 43, 44, 45, 46, 47, 48, 49, 50, 51, 52, 53, 54, 55, 56, 57, 58, 59, 60, 61, 62, 63, 64, 65, 66, 67, 68, 69, 70, 71, 72, 73, 74, 75, 76, 77, 78, 79, 80, 81, 82, 83, 84, 85, 86, 87, 88, 89, 90, 91, 92, 93, 94, 95, 96, 97, 98, 99, 100, 101, 102, 103, 104, 105, 106, 107, 108, 109, 110, 111, 112, 113, 114, 115, 116, 117, 577, 579, 581, 583, 585, 587, 589, 591, 593, 595, 597, 599, 601, 603, 605, 607, 609, 611, 613, 615, 617, 619, 621, 623, 625, or 627, a variant, derivative, orthologue, paralogue or homologue thereof, in which:

[0926] the amino acid at Mutated site 4 is His, and the amino acid at Mutated site 5 is Gly.

[0927] In another preferred embodiment, the mutated PPO comprises a sequence of SEQ ID NO: 1, 2, 3, 4, 5, 6, 7, 8, 9, 10, 11, 12, 13, 14, 15, 16, 17, 18, 19, 20, 21, 22, 23, 24, 25, 26, 27, 28, 29, 30, 31, 32, 33, 34, 35, 36, 37, 38, 39, 40, 41, 42, 43, 44, 45, 46, 47, 48, 49, 50, 51, 52, 53, 54, 55, 56, 57, 58, 59, 60, 61, 62, 63, 64, 65, 66, 67, 68, 69, 70, 71, 72, 73, 74, 75, 76, 77, 78, 79, 80, 81, 82, 83, 84, 85, 86, 87, 88, 89, 90, 91, 92, 93, 94, 95, 96, 97, 98, 99, 100, 101, 102, 103, 104, 105, 106, 107, 108, 109, 110, 111, 112, 113, 114, 115, 116, 117, 577, 579, 581, 583, 585, 587, 589, 591, 593, 595, 597, 599, 601, 603, 605, 607, 609, 611, 613, 615, 617, 619, 621, 623, 625, or 627, a variant, derivative, orthologue, paralogue or homologue thereof, in which:

[0928] the amino acid at Mutated site 4 is His, and the amino acid at Mutated site 5 is Pro.

[0929] In another preferred embodiment, the mutated PPO comprises a sequence of SEQ ID NO: 1, 2, 3, 4, 5, 6, 7, 8, 9, 10, 11, 12, 13, 14, 15, 16, 17, 18, 19, 20, 21, 22, 23, 24, 25, 26, 27, 28, 29, 30, 31, 32, 33, 34, 35, 36, 37, 38, 39, 40, 41, 42, 43, 44, 45, 46, 47, 48, 49, 50, 51, 52, 53, 54, 55, 56, 57, 58, 59, 60, 61, 62, 63, 64, 65, 66, 67, 68, 69, 70, 71, 72, 73, 74, 75, 76, 77, 78, 79, 80, 81, 82, 83, 84, 85, 86, 87, 88, 89, 90, 91, 92, 93, 94, 95, 96, 97, 98, 99, 100, 101, 102, 103, 104, 105, 106, 107, 108, 109, 110, 111, 112, 113, 114, 115, 116, 117, 577, 579, 581, 583, 585, 587, 589, 591, 593, 595, 597, 599, 601, 603, 605, 607, 609, 611, 613, 615, 617, 619, 621, 623, 625, or 627, a variant, derivative, orthologue, paralogue or homologue thereof, in which:

[0930] the amino acid at Mutated site 4 is His, and the amino acid at Mutated site 5 is Arg.

[0931] In another preferred embodiment, the mutated PPO comprises a sequence of SEQ ID NO: 1, 2, 3, 4, 5, 6, 7, 8, 9, 10, 11, 12, 13, 14, 15, 16, 17, 18, 19, 20, 21, 22, 23, 24, 25, 26, 27, 28, 29, 30, 31, 32, 33, 34, 35, 36, 37, 38, 39, 40, 41, 42, 43, 44, 45, 46, 47, 48, 49, 50, 51, 52, 53, 54, 55, 56, 57, 58, 59, 60, 61, 62, 63, 64, 65, 66, 67, 68, 69, 70, 71, 72, 73, 74, 75, 76, 77, 78, 79, 80, 81, 82, 83, 84, 85, 86, 87, 88, 89, 90, 91, 92, 93, 94, 95, 96, 97, 98, 99, 100, 101, 102, 103, 104, 105, 106, 107, 108, 109, 110, 111, 112, 113, 114, 115, 116, 117, 577, 579, 581, 583, 585, 587, 589, 591, 593, 595, 597, 599, 601, 603, 605, 607, 609, 611, 613, 615, 617, 619, 621, 623, 625, or 627, a variant, derivative, orthologue, paralogue or homologue thereof, in which:

[0932] the amino acid at Mutated site 4 is His, and the amino acid at Mutated site 5 is Tyr.

[0933] In another preferred embodiment, the mutated PPO comprises a sequence of SEQ ID NO: 1, 2, 3, 4, 5, 6, 7, 8, 9, 10, 11, 12, 13, 14, 15, 16, 17, 18, 19, 20, 21, 22, 23, 24, 25, 26, 27, 28, 29, 30, 31, 32, 33, 34, 35, 36, 37, 38, 39, 40, 41, 42, 43, 44, 45, 46, 47, 48, 49, 50, 51, 52, 53, 54, 55, 56, 57, 58, 59, 60, 61, 62, 63, 64, 65, 66, 67, 68, 69, 70, 71, 72, 73, 74, 75, 76, 77, 78, 79, 80, 81, 82, 83, 84, 85, 86, 87, 88, 89, 90, 91, 92, 93, 94, 95, 96, 97, 98, 99, 100, 101, 102, 103, 104, 105, 106, 107, 108, 109, 110, 111, 112, 113, 114, 115, 116, 117, 577, 579, 581, 583, 585, 587, 589, 591, 593, 595, 597, 599, 601, 603, 605, 607, 609, 611, 613, 615, 617, 619, 621, 623, 625, or 627, a variant, derivative, orthologue, paralogue or homologue thereof, in which:

[0934] the amino acid at Mutated site 4 is His, and the amino acid at Mutated site 5 is Trp.

[0935] In another preferred embodiment, the mutated PPO comprises a sequence of SEQ ID NO: 1, 2, 3, 4, 5, 6, 7, 8, 9, 10, 11, 12, 13, 14, 15, 16, 17, 18, 19, 20, 21, 22, 23, 24, 25, 26, 27, 28, 29, 30, 31, 32, 33, 34, 35, 36, 37, 38, 39, 40, 41, 42, 43, 44, 45, 46, 47, 48, 49, 50, 51, 52, 53, 54, 55, 56, 57, 58, 59, 60, 61, 62, 63, 64, 65, 66, 67, 68, 69, 70, 71, 72, 73, 74, 75, 76, 77, 78, 79, 80, 81, 82, 83, 84, 85, 86, 87, 88, 89, 90, 91, 92, 93, 94, 95, 96, 97, 98, 99, 100, 101, 102, 103, 104, 105, 106, 107, 108, 109, 110, 111, 112, 113, 114, 115, 116, 117, 577, 579, 581, 583, 585, 587, 589, 591, 593, 595, 597, 599, 601, 603, 605, 607, 609, 611, 613, 615, 617, 619, 621, 623, 625, or 627, a variant, derivative, orthologue, paralogue or homologue thereof, in which:

[0936] the amino acid at Mutated site 4 is Lys, and the amino acid at Mutated site 5 is Ala.

[0937] In another preferred embodiment, the mutated PPO comprises a sequence of SEQ ID NO: 1, 2, 3, 4, 5, 6, 7, 8, 9, 10, 11, 12, 13, 14, 15, 16, 17, 18, 19, 20, 21, 22, 23, 24, 25, 26, 27, 28, 29, 30, 31, 32, 33, 34, 35, 36, 37, 38, 39, 40, 41, 42, 43, 44, 45, 46, 47, 48, 49, 50, 51, 52, 53, 54, 55, 56, 57, 58, 59, 60, 61, 62, 63, 64, 65, 66, 67, 68, 69, 70, 71, 72, 73, 74, 75, 76, 77, 78, 79, 80, 81, 82, 83, 84, 85, 86, 87, 88, 89, 90, 91, 92, 93, 94, 95, 96, 97, 98, 99, 100, 101, 102, 103, 104, 105, 106, 107, 108, 109, 110, 111, 112, 113, 114, 115, 116, 117, 577, 579, 581, 583, 585, 587, 589, 591, 593, 595, 597, 599, 601, 603, 605, 607, 609, 611, 613, 615, 617, 619, 621, 623, 625, or 627, a variant, derivative, orthologue, paralogue or homologue thereof, in which:

[0938] the amino acid at Mutated site 4 is Lys, and the amino acid at Mutated site 5 is Leu.

[0939] In another preferred embodiment, the mutated PPO comprises a sequence of SEQ ID NO: 1, 2, 3, 4, 5, 6, 7, 8, 9, 10, 11, 12, 13, 14, 15, 16, 17, 18, 19, 20, 21, 22, 23, 24, 25, 26, 27, 28, 29, 30, 31, 32, 33, 34, 35, 36, 37, 38, 39, 40, 41, 42, 43, 44, 45, 46, 47, 48, 49, 50, 51, 52, 53, 54, 55, 56, 57, 58, 59, 60, 61, 62, 63, 64, 65, 66, 67, 68, 69, 70, 71, 72, 73, 74, 75, 76, 77, 78, 79, 80, 81, 82, 83, 84, 85, 86, 87, 88, 89, 90, 91, 92, 93, 94, 95, 96, 97, 98, 99, 100, 101, 102, 103, 104, 105, 106, 107, 108, 109, 110, 111, 112, 113, 114, 115, 116, 117, 577, 579, 581, 583, 585, 587, 589, 591, 593, 595, 597, 599, 601, 603, 605, 607, 609, 611, 613, 615, 617, 619, 621, 623, 625, or 627, a variant, derivative, orthologue, paralogue or homologue thereof, in which:

[0940] the amino acid at Mutated site 4 is Lys, and the amino acid at Mutated site 5 is Val.

[0941] In another preferred embodiment, the mutated PPO comprises a sequence of SEQ ID NO: 1, 2, 3, 4, 5, 6, 7, 8, 9, 10, 11, 12, 13, 14, 15, 16, 17, 18, 19, 20, 21, 22, 23, 24, 25, 26, 27, 28, 29, 30, 31, 32, 33, 34, 35, 36, 37, 38, 39, 40, 41, 42, 43, 44, 45, 46, 47, 48, 49, 50, 51, 52, 53, 54, 55, 56, 57, 58, 59, 60, 61, 62, 63, 64, 65, 66, 67, 68, 69, 70, 71, 72, 73, 74, 75, 76, 77, 78, 79, 80, 81, 82, 83, 84, 85, 86, 87, 88, 89, 90, 91, 92, 93, 94, 95, 96, 97, 98, 99, 100, 101, 102, 103, 104, 105, 106, 107, 108, 109, 110, 111, 112, 113, 114, 115, 116, 117, 577, 579, 581, 583, 585, 587, 589, 591, 593, 595, 597, 599, 601, 603, 605, 607, 609, 611, 613, 615, 617, 619, 621, 623, 625, or 627, a variant, derivative, orthologue, paralogue or homologue thereof, in which:

[0942] the amino acid at Mutated site 4 is Lys, and the amino acid at Mutated site 5 is Ile.

[0943] In another preferred embodiment, the mutated PPO comprises a sequence of SEQ ID NO: 1, 2, 3, 4, 5, 6, 7, 8, 9, 10, 11, 12, 13, 14, 15, 16, 17, 18, 19, 20, 21, 22, 23, 24, 25, 26, 27, 28, 29, 30, 31, 32, 33, 34, 35, 36, 37, 38, 39, 40, 41, 42, 43, 44, 45, 46, 47, 48, 49, 50, 51, 52, 53, 54, 55, 56, 57, 58, 59, 60, 61, 62, 63, 64, 65, 66, 67, 68, 69, 70, 71, 72, 73, 74, 75, 76, 77, 78, 79, 80, 81, 82, 83, 84, 85, 86, 87, 88, 89, 90, 91, 92, 93, 94, 95, 96, 97, 98, 99, 100, 101, 102, 103, 104, 105, 106, 107, 108, 109, 110, 111, 112, 113, 114, 115, 116, 117, 577, 579, 581, 583, 585, 587, 589, 591, 593, 595, 597, 599, 601, 603, 605, 607, 609, 611, 613, 615, 617, 619, 621, 623, 625, or 627, a variant, derivative, orthologue, paralogue or homologue thereof, in which:

[0944] the amino acid at Mutated site 4 is Lys, and the amino acid at Mutated site 5 is Met.

[0945] In another preferred embodiment, the mutated PPO comprises a sequence of SEQ ID NO: 1, 2, 3, 4, 5, 6, 7, 8, 9, 10, 11, 12, 13, 14, 15, 16, 17, 18, 19, 20, 21, 22, 23, 24, 25, 26, 27, 28, 29, 30, 31, 32, 33, 34, 35, 36, 37, 38, 39, 40, 41, 42, 43, 44, 45, 46, 47, 48, 49, 50, 51, 52, 53, 54, 55, 56, 57, 58, 59, 60, 61, 62, 63, 64, 65, 66, 67, 68, 69, 70, 71, 72, 73, 74, 75, 76, 77, 78, 79, 80, 81, 82, 83, 84, 85, 86, 87, 88, 89, 90, 91, 92, 93, 94, 95, 96, 97, 98, 99, 100, 101, 102, 103, 104, 105, 106, 107, 108, 109, 110, 111, 112, 113, 114, 115, 116, 117, 577, 579, 581, 583, 585, 587, 589, 591, 593, 595, 597, 599, 601, 603, 605, 607, 609, 611, 613, 615, 617, 619, 621, 623, 625, or 627, a variant, derivative, orthologue, paralogue or homologue thereof, in which:

[0946] the amino acid at Mutated site 4 is Lys, and the amino acid at Mutated site 5 is His.

[0947] In another preferred embodiment, the mutated PPO comprises a sequence of SEQ ID NO: 1, 2, 3, 4, 5, 6, 7, 8, 9, 10, 11, 12, 13, 14, 15, 16, 17, 18, 19, 20, 21, 22, 23, 24, 25, 26, 27, 28, 29, 30, 31, 32, 33, 34, 35, 36, 37, 38, 39, 40, 41, 42, 43, 44, 45, 46, 47, 48, 49, 50, 51, 52, 53, 54, 55, 56, 57, 58, 59, 60, 61, 62, 63, 64, 65, 66, 67, 68, 69, 70, 71, 72, 73, 74, 75, 76, 77, 78, 79, 80, 81, 82, 83, 84, 85, 86, 87, 88, 89, 90, 91, 92, 93, 94, 95, 96, 97, 98, 99, 100, 101, 102, 103, 104, 105, 106, 107, 108, 109, 110, 111, 112, 113, 114, 115, 116, 117, 577, 579, 581, 583, 585, 587, 589, 591, 593, 595, 597, 599, 601, 603, 605, 607, 609, 611, 613, 615, 617, 619, 621, 623, 625, or 627, a variant, derivative, orthologue, paralogue or homologue thereof, in which:

[0948] the amino acid at Mutated site 4 is Lys, and the amino acid at Mutated site 5 is Lys.

[0949] In another preferred embodiment, the mutated PPO comprises a sequence of SEQ ID NO: 1, 2, 3, 4, 5, 6, 7, 8, 9, 10, 11, 12, 13, 14, 15, 16, 17, 18, 19, 20, 21, 22, 23, 24, 25, 26, 27, 28, 29, 30, 31, 32, 33, 34, 35, 36, 37, 38, 39, 40, 41, 42, 43, 44, 45, 46, 47, 48, 49, 50, 51, 52, 53, 54, 55, 56, 57, 58, 59, 60, 61, 62, 63, 64, 65, 66, 67, 68, 69, 70, 71, 72, 73, 74, 75, 76, 77, 78, 79, 80, 81, 82, 83, 84, 85, 86, 87, 88, 89, 90, 91, 92, 93, 94, 95, 96, 97, 98, 99, 100, 101, 102, 103, 104, 105, 106, 107, 108, 109, 110, 111, 112, 113, 114, 115, 116, 117, 577, 579, 581, 583, 585, 587, 589, 591, 593, 595, 597, 599, 601, 603, 605, 607, 609, 611, 613, 615, 617, 619, 621, 623, 625, or 627, a variant, derivative, orthologue, paralogue or homologue thereof, in which:

[0950] the amino acid at Mutated site 4 is Lys, and the amino acid at Mutated site 5 is Asp.

[0951] In another preferred embodiment, the mutated PPO comprises a sequence of SEQ ID NO: 1, 2, 3, 4, 5, 6, 7, 8, 9, 10, 11, 12, 13, 14, 15, 16, 17, 18, 19, 20, 21, 22, 23, 24, 25, 26, 27, 28, 29, 30, 31, 32, 33, 34, 35, 36, 37, 38, 39, 40, 41, 42, 43, 44, 45, 46, 47, 48, 49, 50, 51, 52, 53, 54, 55, 56, 57, 58, 59, 60, 61, 62, 63, 64, 65, 66, 67, 68, 69, 70, 71, 72, 73, 74, 75, 76, 77, 78, 79, 80, 81, 82, 83, 84, 85, 86, 87, 88, 89, 90, 91, 92, 93, 94, 95, 96, 97, 98, 99, 100, 101, 102, 103, 104, 105, 106, 107, 108, 109, 110, 111, 112, 113, 114, 115, 116, 117, 577, 579, 581, 583, 585, 587, 589, 591, 593, 595, 597, 599, 601, 603, 605, 607, 609, 611, 613, 615, 617, 619, 621, 623, 625, or 627, a variant, derivative, orthologue, paralogue or homologue thereof, in which:

[0952] the amino acid at Mutated site 4 is Lys, and the amino acid at Mutated site 5 is Glu.

[0953] In another preferred embodiment, the mutated PPO comprises a sequence of SEQ ID NO: 1, 2, 3, 4, 5, 6, 7, 8, 9, 10, 11, 12, 13, 14, 15, 16, 17, 18, 19, 20, 21, 22, 23, 24, 25, 26, 27, 28, 29, 30, 31, 32, 33, 34, 35, 36, 37, 38, 39, 40, 41, 42, 43, 44, 45, 46, 47, 48, 49, 50, 51, 52, 53, 54, 55, 56, 57, 58, 59, 60, 61, 62, 63, 64, 65, 66, 67, 68, 69, 70, 71, 72, 73, 74, 75, 76, 77, 78, 79, 80, 81, 82, 83, 84, 85, 86, 87, 88, 89, 90, 91, 92, 93, 94, 95, 96, 97, 98, 99, 100, 101, 102, 103, 104, 105, 106, 107, 108, 109, 110, 111, 112, 113, 114, 115, 116, 117, 577, 579, 581, 583, 585, 587, 589, 591, 593, 595, 597, 599, 601, 603, 605, 607, 609, 611, 613, 615, 617, 619, 621, 623, 625, or 627, a variant, derivative, orthologue, paralogue or homologue thereof, in which:

[0954] the amino acid at Mutated site 4 is Lys, and the amino acid at Mutated site 5 is Ser.

[0955] In another preferred embodiment, the mutated PPO comprises a sequence of SEQ ID NO: 1, 2, 3, 4, 5, 6, 7, 8, 9, 10, 11, 12, 13, 14, 15, 16, 17, 18, 19, 20, 21, 22, 23, 24, 25, 26, 27, 28, 29, 30, 31, 32, 33, 34, 35, 36, 37, 38, 39, 40, 41, 42, 43, 44, 45, 46, 47, 48, 49, 50, 51, 52, 53, 54, 55, 56, 57, 58, 59, 60, 61, 62, 63, 64, 65, 66, 67, 68, 69, 70, 71, 72, 73, 74, 75, 76, 77, 78, 79, 80, 81, 82, 83, 84, 85, 86, 87, 88, 89, 90, 91, 92, 93, 94, 95, 96, 97, 98, 99, 100, 101, 102, 103, 104, 105, 106, 107, 108, 109, 110, 111, 112, 113, 114, 115, 116, 117, 577, 579, 581, 583, 585, 587, 589, 591, 593, 595, 597, 599, 601, 603, 605, 607, 609, 611, 613, 615, 617, 619, 621, 623, 625, or 627, a variant, derivative, orthologue, paralogue or homologue thereof, in which:

[0956] the amino acid at Mutated site 4 is Lys, and the amino acid at Mutated site 5 is Thr.

[0957] In another preferred embodiment, the mutated PPO comprises a sequence of SEQ ID NO: 1, 2, 3, 4, 5, 6, 7, 8, 9, 10, 11, 12, 13, 14, 15, 16, 17, 18, 19, 20, 21, 22, 23, 24, 25, 26, 27, 28, 29, 30, 31, 32, 33, 34, 35, 36, 37, 38, 39, 40, 41, 42, 43, 44, 45, 46, 47, 48, 49, 50, 51, 52, 53, 54, 55, 56, 57, 58, 59, 60, 61, 62, 63, 64, 65, 66, 67, 68, 69, 70, 71, 72, 73, 74, 75, 76, 77, 78, 79, 80, 81, 82, 83, 84, 85, 86, 87, 88, 89, 90, 91, 92, 93, 94, 95, 96, 97, 98, 99, 100, 101, 102, 103, 104, 105, 106, 107, 108, 109, 110, 111, 112, 113, 114, 115, 116, 117, 577, 579, 581, 583, 585, 587, 589, 591, 593, 595, 597, 599, 601, 603, 605, 607, 609, 611, 613, 615, 617, 619, 621, 623, 625, or 627, a variant, derivative, orthologue, paralogue or homologue thereof, in which:

[0958] the amino acid at Mutated site 4 is Lys, and the amino acid at Mutated site 5 is Asn.

[0959] In another preferred embodiment, the mutated PPO comprises a sequence of SEQ ID NO: 1, 2, 3, 4, 5, 6, 7, 8, 9, 10, 11, 12, 13, 14, 15, 16, 17, 18, 19, 20, 21, 22, 23, 24, 25, 26, 27, 28, 29, 30, 31, 32, 33, 34, 35, 36, 37, 38, 39, 40, 41, 42, 43, 44, 45, 46, 47, 48, 49, 50, 51, 52, 53, 54, 55, 56, 57, 58, 59, 60, 61, 62, 63, 64, 65, 66, 67, 68, 69, 70, 71, 72, 73, 74, 75, 76, 77, 78, 79, 80, 81, 82, 83, 84, 85, 86, 87, 88, 89, 90, 91, 92, 93, 94, 95, 96, 97, 98, 99, 100, 101, 102, 103, 104, 105, 106, 107, 108, 109, 110, 111, 112, 113, 114, 115, 116, 117, 577, 579, 581, 583, 585, 587, 589, 591, 593, 595, 597, 599, 601, 603, 605, 607, 609, 611, 613, 615, 617, 619, 621, 623, 625, or 627, a variant, derivative, orthologue, paralogue or homologue thereof, in which:

[0960] the amino acid at Mutated site 4 is Lys, and the amino acid at Mutated site 5 is Gln.

[0961] In another preferred embodiment, the mutated PPO comprises a sequence of SEQ ID NO: 1, 2, 3, 4, 5, 6, 7, 8, 9, 10, 11, 12, 13, 14, 15, 16, 17, 18, 19, 20, 21, 22, 23, 24, 25, 26, 27, 28, 29, 30, 31, 32, 33, 34, 35, 36, 37, 38, 39, 40, 41, 42, 43, 44, 45, 46, 47, 48, 49, 50, 51, 52, 53, 54, 55, 56, 57, 58, 59, 60, 61, 62, 63, 64, 65, 66, 67, 68, 69, 70, 71, 72, 73, 74, 75, 76, 77, 78, 79, 80, 81, 82, 83, 84, 85, 86, 87, 88, 89, 90, 91, 92, 93, 94, 95, 96, 97, 98, 99, 100, 101, 102, 103, 104, 105, 106, 107, 108, 109, 110, 111, 112, 113, 114, 115, 116, 117, 577, 579, 581, 583, 585, 587, 589, 591, 593, 595, 597, 599, 601, 603, 605, 607, 609, 611, 613, 615, 617, 619, 621, 623, 625, or 627, a variant, derivative, orthologue, paralogue or homologue thereof, in which:

[0962] the amino acid at Mutated site 4 is Lys, and the amino acid at Mutated site 5 is Cys.

[0963] In another preferred embodiment, the mutated PPO comprises a sequence of SEQ ID NO: 1, 2, 3, 4, 5, 6, 7, 8, 9, 10, 11, 12, 13, 14, 15, 16, 17, 18, 19, 20, 21, 22, 23, 24, 25, 26, 27, 28, 29, 30, 31, 32, 33, 34, 35, 36, 37, 38, 39, 40, 41, 42, 43, 44, 45, 46, 47, 48, 49, 50, 51, 52, 53, 54, 55, 56, 57, 58, 59, 60, 61, 62, 63, 64, 65, 66, 67, 68, 69, 70, 71, 72, 73, 74, 75, 76, 77, 78, 79, 80, 81, 82, 83, 84, 85, 86, 87, 88, 89, 90, 91, 92, 93, 94, 95, 96, 97, 98, 99, 100, 101, 102, 103, 104, 105, 106, 107, 108, 109, 110, 111, 112, 113, 114, 115, 116, 117, 577, 579, 581, 583, 585, 587, 589, 591, 593, 595, 597, 599, 601, 603, 605, 607, 609, 611, 613, 615, 617, 619, 621, 623, 625, or 627, a variant, derivative, orthologue, paralogue or homologue thereof, in which:

[0964] the amino acid at Mutated site 4 is Lys, and the amino acid at Mutated site 5 is Gly.

[0965] In another preferred embodiment, the mutated PPO comprises a sequence of SEQ ID NO: 1, 2, 3, 4, 5, 6, 7, 8, 9, 10, 11, 12, 13, 14, 15, 16, 17, 18, 19, 20, 21, 22, 23, 24, 25, 26, 27, 28, 29, 30, 31, 32, 33, 34, 35, 36, 37, 38, 39, 40, 41, 42, 43, 44, 45, 46, 47, 48, 49, 50, 51, 52, 53, 54, 55, 56, 57, 58, 59, 60, 61, 62, 63, 64, 65, 66, 67, 68, 69, 70, 71, 72, 73, 74, 75, 76, 77, 78, 79, 80, 81, 82, 83, 84, 85, 86, 87, 88, 89, 90, 91, 92, 93, 94, 95, 96, 97, 98, 99, 100, 101, 102, 103, 104, 105, 106, 107, 108, 109, 110, 111, 112, 113, 114, 115, 116, 117, 577, 579, 581, 583, 585, 587, 589, 591, 593, 595, 597, 599, 601, 603, 605, 607, 609, 611, 613, 615, 617, 619, 621, 623, 625, or 627, a variant, derivative, orthologue, paralogue or homologue thereof, in which:

[0966] the amino acid at Mutated site 4 is Lys, and the amino acid at Mutated site 5 is Pro.

[0967] In another preferred embodiment, the mutated PPO comprises a sequence of SEQ ID NO: 1, 2, 3, 4, 5, 6, 7, 8, 9, 10, 11, 12, 13, 14, 15, 16, 17, 18, 19, 20, 21, 22, 23, 24, 25, 26, 27, 28, 29, 30, 31, 32, 33, 34, 35, 36, 37, 38, 39, 40, 41, 42, 43, 44, 45, 46, 47, 48, 49, 50, 51, 52, 53, 54, 55, 56, 57, 58, 59, 60, 61, 62, 63, 64, 65, 66, 67, 68, 69, 70, 71, 72, 73, 74, 75, 76, 77, 78, 79, 80, 81, 82, 83, 84, 85, 86, 87, 88, 89, 90, 91, 92, 93, 94, 95, 96, 97, 98, 99, 100, 101, 102, 103, 104, 105, 106, 107, 108, 109, 110, 111, 112, 113, 114, 115, 116, 117, 577, 579, 581, 583, 585, 587, 589, 591, 593, 595, 597, 599, 601, 603, 605, 607, 609, 611, 613, 615, 617, 619, 621, 623, 625, or 627, a variant, derivative, orthologue, paralogue or homologue thereof, in which:

[0968] the amino acid at Mutated site 4 is Lys, and the amino acid at Mutated site 5 is Arg.

[0969] In another preferred embodiment, the mutated PPO comprises a sequence of SEQ ID NO: 1, 2, 3, 4, 5, 6, 7, 8, 9, 10, 11, 12, 13, 14, 15, 16, 17, 18, 19, 20, 21, 22, 23, 24, 25, 26, 27, 28, 29, 30, 31, 32, 33, 34, 35, 36, 37, 38, 39, 40, 41, 42, 43, 44, 45, 46, 47, 48, 49, 50, 51, 52, 53, 54, 55, 56, 57, 58, 59, 60, 61, 62, 63, 64, 65, 66, 67, 68, 69, 70, 71, 72, 73, 74, 75, 76, 77, 78, 79, 80, 81, 82, 83, 84, 85, 86, 87, 88, 89, 90, 91, 92, 93, 94, 95, 96, 97, 98, 99, 100, 101, 102, 103, 104, 105, 106, 107, 108, 109, 110, 111, 112, 113, 114, 115, 116, 117, 577, 579, 581, 583, 585, 587, 589, 591, 593, 595, 597, 599, 601, 603, 605, 607, 609, 611, 613, 615, 617, 619, 621, 623, 625, or 627, a variant, derivative, orthologue, paralogue or homologue thereof, in which:

[0970] the amino acid at Mutated site 4 is Lys, and the amino acid at Mutated site 5 is Tyr.

[0971] In another preferred embodiment, the mutated PPO comprises a sequence of SEQ ID NO: 1, 2, 3, 4, 5, 6, 7, 8, 9, 10, 11, 12, 13, 14, 15, 16, 17, 18, 19, 20, 21, 22, 23, 24, 25, 26, 27, 28, 29, 30, 31, 32, 33, 34, 35, 36, 37, 38, 39, 40, 41, 42, 43, 44, 45, 46, 47, 48, 49, 50, 51, 52, 53, 54, 55, 56, 57, 58, 59, 60, 61, 62, 63, 64, 65, 66, 67, 68, 69, 70, 71, 72, 73, 74, 75, 76, 77, 78, 79, 80, 81, 82, 83, 84, 85, 86, 87, 88, 89, 90, 91, 92, 93, 94, 95, 96, 97, 98, 99, 100, 101, 102, 103, 104, 105, 106, 107, 108, 109, 110, 111, 112, 113, 114, 115, 116, 117, 577, 579, 581, 583, 585, 587, 589, 591, 593, 595, 597, 599, 601, 603, 605, 607, 609, 611, 613, 615, 617, 619, 621, 623, 625, or 627, a variant, derivative, orthologue, paralogue or homologue thereof, in which:

[0972] the amino acid at Mutated site 4 is Lys, and the amino acid at Mutated site 5 is Trp.

[0973] In another preferred embodiment, the mutated PPO comprises a sequence of SEQ ID NO: 1, 2, 3, 4, 5, 6, 7, 8, 9, 10, 11, 12, 13, 14, 15, 16, 17, 18, 19, 20, 21, 22, 23, 24, 25, 26, 27, 28, 29, 30, 31, 32, 33, 34, 35, 36, 37, 38, 39, 40, 41, 42, 43, 44, 45, 46, 47, 48, 49, 50, 51, 52, 53, 54, 55, 56, 57, 58, 59, 60, 61, 62, 63, 64, 65, 66, 67, 68, 69, 70, 71, 72, 73, 74, 75, 76, 77, 78, 79, 80, 81, 82, 83, 84, 85, 86, 87, 88, 89, 90, 91, 92, 93, 94, 95, 96, 97, 98, 99, 100, 101, 102, 103, 104, 105, 106, 107, 108, 109, 110, 111, 112, 113, 114, 115, 116, 117, 577, 579, 581, 583, 585, 587, 589, 591, 593, 595, 597, 599, 601, 603, 605, 607, 609, 611, 613, 615, 617, 619, 621, 623, 625, or 627, a variant, derivative, orthologue, paralogue or homologue thereof, in which:

[0974] the amino acid at Mutated site 4 is Asp, and the amino acid at Mutated site 5 is Ala.

[0975] In another preferred embodiment, the mutated PPO comprises a sequence of SEQ ID NO: 1, 2, 3, 4, 5, 6, 7, 8, 9, 10, 11, 12, 13, 14, 15, 16, 17, 18, 19, 20, 21, 22, 23, 24, 25, 26, 27, 28, 29, 30, 31, 32, 33, 34, 35, 36, 37, 38, 39, 40, 41, 42, 43, 44, 45, 46, 47, 48, 49, 50, 51, 52, 53, 54, 55, 56, 57, 58, 59, 60, 61, 62, 63, 64, 65, 66, 67, 68, 69, 70, 71, 72, 73, 74, 75, 76, 77, 78, 79, 80, 81, 82, 83, 84, 85, 86, 87, 88, 89, 90, 91, 92, 93, 94, 95, 96, 97, 98, 99, 100, 101, 102, 103, 104, 105, 106, 107, 108, 109, 110, 111, 112, 113, 114, 115, 116, 117, 577, 579, 581, 583, 585, 587, 589, 591, 593, 595, 597, 599, 601, 603, 605, 607, 609, 611, 613, 615, 617, 619, 621, 623, 625, or 627, a variant, derivative, orthologue, paralogue or homologue thereof, in which:

[0976] the amino acid at Mutated site 4 is Asp, and the amino acid at Mutated site 5 is Leu.

[0977] In another preferred embodiment, the mutated PPO comprises a sequence of SEQ ID NO: 1, 2, 3, 4, 5, 6, 7, 8, 9, 10, 11, 12, 13, 14, 15, 16, 17, 18, 19, 20, 21, 22, 23, 24, 25, 26, 27, 28, 29, 30, 31, 32, 33, 34, 35, 36, 37, 38, 39, 40, 41, 42, 43, 44, 45, 46, 47, 48, 49, 50, 51, 52, 53, 54, 55, 56, 57, 58, 59, 60, 61, 62, 63, 64, 65, 66, 67, 68, 69, 70, 71, 72, 73, 74, 75, 76, 77, 78, 79, 80, 81, 82, 83, 84, 85, 86, 87, 88, 89, 90, 91, 92, 93, 94, 95, 96, 97, 98, 99, 100, 101, 102, 103, 104, 105, 106, 107, 108, 109, 110, 111, 112, 113, 114, 115, 116, 117, 577, 579, 581, 583, 585, 587, 589, 591, 593, 595, 597, 599, 601, 603, 605, 607, 609, 611, 613, 615, 617, 619, 621, 623, 625, or 627, a variant, derivative, orthologue, paralogue or homologue thereof, in which:

[0978] the amino acid at Mutated site 4 is Asp, and the amino acid at Mutated site 5 is Val.

[0979] In another preferred embodiment, the mutated PPO comprises a sequence of SEQ ID NO: 1, 2, 3, 4, 5, 6, 7, 8, 9, 10, 11, 12, 13, 14, 15, 16, 17, 18, 19, 20, 21, 22, 23, 24, 25, 26, 27, 28, 29, 30, 31, 32, 33, 34, 35, 36, 37, 38, 39, 40, 41, 42, 43, 44, 45, 46, 47, 48, 49, 50, 51, 52, 53, 54, 55, 56, 57, 58, 59, 60, 61, 62, 63, 64, 65, 66, 67, 68, 69, 70, 71, 72, 73, 74, 75, 76, 77, 78, 79, 80, 81, 82, 83, 84, 85, 86, 87, 88, 89, 90, 91, 92, 93, 94, 95, 96, 97, 98, 99, 100, 101, 102, 103, 104, 105, 106, 107, 108, 109, 110, 111, 112, 113, 114, 115, 116, 117, 577, 579, 581, 583, 585, 587, 589, 591, 593, 595, 597, 599, 601, 603, 605, 607, 609, 611, 613, 615, 617, 619, 621, 623, 625, or 627, a variant, derivative, orthologue, paralogue or homologue thereof, in which:

[0980] the amino acid at Mutated site 4 is Asp, and the amino acid at Mutated site 5 is Ile.

[0981] In another preferred embodiment, the mutated PPO comprises a sequence of SEQ ID NO: 1, 2, 3, 4, 5, 6, 7, 8, 9, 10, 11, 12, 13, 14, 15, 16, 17, 18, 19, 20, 21, 22, 23, 24, 25, 26, 27, 28, 29, 30, 31, 32, 33, 34, 35, 36, 37, 38, 39, 40, 41, 42, 43, 44, 45, 46, 47, 48, 49, 50, 51, 52, 53, 54, 55, 56, 57, 58, 59, 60, 61, 62, 63, 64, 65, 66, 67, 68, 69, 70, 71, 72, 73, 74, 75, 76, 77, 78, 79, 80, 81, 82, 83, 84, 85, 86, 87, 88, 89, 90, 91, 92, 93, 94, 95, 96, 97, 98, 99, 100, 101, 102, 103, 104, 105, 106, 107, 108, 109, 110, 111, 112, 113, 114, 115, 116, 117, 577, 579, 581, 583, 585, 587, 589, 591, 593, 595, 597, 599, 601, 603, 605, 607, 609, 611, 613, 615, 617, 619, 621, 623, 625, or 627, a variant, derivative, orthologue, paralogue or homologue thereof, in which:

[0982] the amino acid at Mutated site 4 is Asp, and the amino acid at Mutated site 5 is Met.

[0983] In another preferred embodiment, the mutated PPO comprises a sequence of SEQ ID NO: 1, 2, 3, 4, 5, 6, 7, 8, 9, 10, 11, 12, 13, 14, 15, 16, 17, 18, 19, 20, 21, 22, 23, 24, 25, 26, 27, 28, 29, 30, 31, 32, 33, 34, 35, 36, 37, 38, 39, 40, 41, 42, 43, 44, 45, 46, 47, 48, 49, 50, 51, 52, 53, 54, 55, 56, 57, 58, 59, 60, 61, 62, 63, 64, 65, 66, 67, 68, 69, 70, 71, 72, 73, 74, 75, 76, 77, 78, 79, 80, 81, 82, 83, 84, 85, 86, 87, 88, 89, 90, 91, 92, 93, 94, 95, 96, 97, 98, 99, 100, 101, 102, 103, 104, 105, 106, 107, 108, 109, 110, 111, 112, 113, 114, 115, 116, 117, 577, 579, 581, 583, 585, 587, 589, 591, 593, 595, 597, 599, 601, 603, 605, 607, 609, 611, 613, 615, 617, 619, 621, 623, 625, or 627, a variant, derivative, orthologue, paralogue or homologue thereof, in which:

[0984] the amino acid at Mutated site 4 is Asp, and the amino acid at Mutated site 5 is His.

[0985] In another preferred embodiment, the mutated PPO comprises a sequence of SEQ ID NO: 1, 2, 3, 4, 5, 6, 7, 8, 9, 10, 11, 12, 13, 14, 15, 16, 17, 18, 19, 20, 21, 22, 23, 24, 25, 26, 27, 28, 29, 30, 31, 32, 33, 34, 35, 36, 37, 38, 39, 40, 41, 42, 43, 44, 45, 46, 47, 48, 49, 50, 51, 52, 53, 54, 55, 56, 57, 58, 59, 60, 61, 62, 63, 64, 65, 66, 67, 68, 69, 70, 71, 72, 73, 74, 75, 76, 77, 78, 79, 80, 81, 82, 83, 84, 85, 86, 87, 88, 89, 90, 91, 92, 93, 94, 95, 96, 97, 98, 99, 100, 101, 102, 103, 104, 105, 106, 107, 108, 109, 110, 111, 112, 113, 114, 115, 116, 117, 577, 579, 581, 583, 585, 587, 589, 591, 593, 595, 597, 599, 601, 603, 605, 607, 609, 611, 613, 615, 617, 619, 621, 623, 625, or 627, a variant, derivative, orthologue, paralogue or homologue thereof, in which:

[0986] the amino acid at Mutated site 4 is Asp, and the amino acid at Mutated site 5 is Lys.

[0987] In another preferred embodiment, the mutated PPO comprises a sequence of SEQ ID NO: 1, 2, 3, 4, 5, 6, 7, 8, 9, 10, 11, 12, 13, 14, 15, 16, 17, 18, 19, 20, 21, 22, 23, 24, 25, 26, 27, 28, 29, 30, 31, 32, 33, 34, 35, 36, 37, 38, 39, 40, 41, 42, 43, 44, 45, 46, 47, 48, 49, 50, 51, 52, 53, 54, 55, 56, 57, 58, 59, 60, 61, 62, 63, 64, 65, 66, 67, 68, 69, 70, 71, 72, 73, 74, 75, 76, 77, 78, 79, 80, 81, 82, 83, 84, 85, 86, 87, 88, 89, 90, 91, 92, 93, 94, 95, 96, 97, 98, 99, 100, 101, 102, 103, 104, 105, 106, 107, 108, 109, 110, 111, 112, 113, 114, 115, 116, 117, 577, 579, 581, 583, 585, 587, 589, 591, 593, 595, 597, 599, 601, 603, 605, 607, 609, 611, 613, 615, 617, 619, 621, 623, 625, or 627, a variant, derivative, orthologue, paralogue or homologue thereof, in which:

[0988] the amino acid at Mutated site 4 is Asp, and the amino acid at Mutated site 5 is Asp.

[0989] In another preferred embodiment, the mutated PPO comprises a sequence of SEQ ID NO: 1, 2, 3, 4, 5, 6, 7, 8, 9, 10, 11, 12, 13, 14, 15, 16, 17, 18, 19, 20, 21, 22, 23, 24, 25, 26, 27, 28, 29, 30, 31, 32, 33, 34, 35, 36, 37, 38, 39, 40, 41, 42, 43, 44, 45, 46, 47, 48, 49, 50, 51, 52, 53, 54, 55, 56, 57, 58, 59, 60, 61, 62, 63, 64, 65, 66, 67, 68, 69, 70, 71, 72, 73, 74, 75, 76, 77, 78, 79, 80, 81, 82, 83, 84, 85, 86, 87, 88, 89, 90, 91, 92, 93, 94, 95, 96, 97, 98, 99, 100, 101, 102, 103, 104, 105, 106, 107, 108, 109, 110, 111, 112, 113, 114, 115, 116, 117, 577, 579, 581, 583, 585, 587, 589, 591, 593, 595, 597, 599, 601, 603, 605, 607, 609, 611, 613, 615, 617, 619, 621, 623, 625, or 627, a variant, derivative, orthologue, paralogue or homologue thereof, in which:

[0990] the amino acid at Mutated site 4 is Asp, and the amino acid at Mutated site 5 is Glu.

[0991] In another preferred embodiment, the mutated PPO comprises a sequence of SEQ ID NO: 1, 2, 3, 4, 5, 6, 7, 8, 9, 10, 11, 12, 13, 14, 15, 16, 17, 18, 19, 20, 21, 22, 23, 24, 25, 26, 27, 28, 29, 30, 31, 32, 33, 34, 35, 36, 37, 38, 39, 40, 41, 42, 43, 44, 45, 46, 47, 48, 49, 50, 51, 52, 53, 54, 55, 56, 57, 58, 59, 60, 61, 62, 63, 64, 65, 66, 67, 68, 69, 70, 71, 72, 73, 74, 75, 76, 77, 78, 79, 80, 81, 82, 83, 84, 85, 86, 87, 88, 89, 90, 91, 92, 93, 94, 95, 96, 97, 98, 99, 100, 101, 102, 103, 104, 105, 106, 107, 108, 109, 110, 111, 112, 113, 114, 115, 116, 117, 577, 579, 581, 583, 585, 587, 589, 591, 593, 595, 597, 599, 601, 603, 605, 607, 609, 611, 613, 615, 617, 619, 621, 623, 625, or 627, a variant, derivative, orthologue, paralogue or homologue thereof, in which:

[0992] the amino acid at Mutated site 4 is Asp, and the amino acid at Mutated site 5 is Ser.

[0993] In another preferred embodiment, the mutated PPO comprises a sequence of SEQ ID NO: 1, 2, 3, 4, 5, 6, 7, 8, 9, 10, 11, 12, 13, 14, 15, 16, 17, 18, 19, 20, 21, 22, 23, 24, 25, 26, 27, 28, 29, 30, 31, 32, 33, 34, 35, 36, 37, 38, 39, 40, 41, 42, 43, 44, 45, 46, 47, 48, 49, 50, 51, 52, 53, 54, 55, 56, 57, 58, 59, 60, 61, 62, 63, 64, 65, 66, 67, 68, 69, 70, 71, 72, 73, 74, 75, 76, 77, 78, 79, 80, 81, 82, 83, 84, 85, 86, 87, 88, 89, 90, 91, 92, 93, 94, 95, 96, 97, 98, 99, 100, 101, 102, 103, 104, 105, 106, 107, 108, 109, 110, 111, 112, 113, 114, 115, 116, 117, 577, 579, 581, 583, 585, 587, 589, 591, 593, 595, 597, 599, 601, 603, 605, 607, 609, 611, 613, 615, 617, 619, 621, 623, 625, or 627, a variant, derivative, orthologue, paralogue or homologue thereof, in which:

[0994] the amino acid at Mutated site 4 is Asp, and the amino acid at Mutated site 5 is Thr.

[0995] In another preferred embodiment, the mutated PPO comprises a sequence of SEQ ID NO: 1, 2, 3, 4, 5, 6, 7, 8, 9, 10, 11, 12, 13, 14, 15, 16, 17, 18, 19, 20, 21, 22, 23, 24, 25, 26, 27, 28, 29, 30, 31, 32, 33, 34, 35, 36, 37, 38, 39, 40, 41, 42, 43, 44, 45, 46, 47, 48, 49, 50, 51, 52, 53, 54, 55, 56, 57, 58, 59, 60, 61, 62, 63, 64, 65, 66, 67, 68, 69, 70, 71, 72, 73, 74, 75, 76, 77, 78, 79, 80, 81, 82, 83, 84, 85, 86, 87, 88, 89, 90, 91, 92, 93, 94, 95, 96, 97, 98, 99, 100, 101, 102, 103, 104, 105, 106, 107, 108, 109, 110, 111, 112, 113, 114, 115, 116, 117, 577, 579, 581, 583, 585, 587, 589, 591, 593, 595, 597, 599, 601, 603, 605, 607, 609, 611, 613, 615, 617, 619, 621, 623, 625, or 627, a variant, derivative, orthologue, paralogue or homologue thereof, in which:

[0996] the amino acid at Mutated site 4 is Asp, and the amino acid at Mutated site 5 is Asn.

[0997] In another preferred embodiment, the mutated PPO comprises a sequence of SEQ ID NO: 1, 2, 3, 4, 5, 6, 7, 8, 9, 10, 11, 12, 13, 14, 15, 16, 17, 18, 19, 20, 21, 22, 23, 24, 25, 26, 27, 28, 29, 30, 31, 32, 33, 34, 35, 36, 37, 38, 39, 40, 41, 42, 43, 44, 45, 46, 47, 48, 49, 50, 51, 52, 53, 54, 55, 56, 57, 58, 59, 60, 61, 62, 63, 64, 65, 66, 67, 68, 69, 70, 71, 72, 73, 74, 75, 76, 77, 78, 79, 80, 81, 82, 83, 84, 85, 86, 87, 88, 89, 90, 91, 92, 93, 94, 95, 96, 97, 98, 99, 100, 101, 102, 103, 104, 105, 106, 107, 108, 109, 110, 111, 112, 113, 114, 115, 116, 117, 577, 579, 581, 583, 585, 587, 589, 591, 593, 595, 597, 599, 601, 603, 605, 607, 609, 611, 613, 615, 617, 619, 621, 623, 625, or 627, a variant, derivative, orthologue, paralogue or homologue thereof, in which:

[0998] the amino acid at Mutated site 4 is Asp, and the amino acid at Mutated site 5 is Gln.

[0999] In another preferred embodiment, the mutated PPO comprises a sequence of SEQ ID NO: 1, 2, 3, 4, 5, 6, 7, 8, 9, 10, 11, 12, 13, 14, 15, 16, 17, 18, 19, 20, 21, 22, 23, 24, 25, 26, 27, 28, 29, 30, 31, 32, 33, 34, 35, 36, 37, 38, 39, 40, 41, 42, 43, 44, 45, 46, 47, 48, 49, 50, 51, 52, 53, 54, 55, 56, 57, 58, 59, 60, 61, 62, 63, 64, 65, 66, 67, 68, 69, 70, 71, 72, 73, 74, 75, 76, 77, 78, 79, 80, 81, 82, 83, 84, 85, 86, 87, 88, 89, 90, 91, 92, 93, 94, 95, 96, 97, 98, 99, 100, 101, 102, 103, 104, 105, 106, 107, 108, 109, 110, 111, 112, 113, 114, 115, 116, 117, 577, 579, 581, 583, 585, 587, 589, 591, 593, 595, 597, 599, 601, 603, 605, 607, 609, 611, 613, 615, 617, 619, 621, 623, 625, or 627, a variant, derivative, orthologue, paralogue or homologue thereof, in which:

[1000] the amino acid at Mutated site 4 is Asp, and the amino acid at Mutated site 5 is Cys.

[1001] In another preferred embodiment, the mutated PPO comprises a sequence of SEQ ID NO: 1, 2, 3, 4, 5, 6, 7, 8, 9, 10, 11, 12, 13, 14, 15, 16, 17, 18, 19, 20, 21, 22, 23, 24, 25, 26, 27, 28, 29, 30, 31, 32, 33, 34, 35, 36, 37, 38, 39, 40, 41, 42, 43, 44, 45, 46, 47, 48, 49, 50, 51, 52, 53, 54, 55, 56, 57, 58, 59, 60, 61, 62, 63, 64, 65, 66, 67, 68, 69, 70, 71, 72, 73, 74, 75, 76, 77, 78, 79, 80, 81, 82, 83, 84, 85, 86, 87, 88, 89, 90, 91, 92, 93, 94, 95, 96, 97, 98, 99, 100, 101, 102, 103, 104, 105, 106, 107, 108, 109, 110, 111, 112, 113, 114, 115, 116, 117, 577, 579, 581, 583, 585, 587, 589, 591, 593, 595, 597, 599, 601, 603, 605, 607, 609, 611, 613, 615, 617, 619, 621, 623, 625, or 627, a variant, derivative, orthologue, paralogue or homologue thereof, in which:

[1002] the amino acid at Mutated site 4 is Asp, and the amino acid at Mutated site 5 is Gly.

[1003] In another preferred embodiment, the mutated PPO comprises a sequence of SEQ ID NO: 1, 2, 3, 4, 5, 6, 7, 8, 9, 10, 11, 12, 13, 14, 15, 16, 17, 18, 19, 20, 21, 22, 23, 24, 25, 26, 27, 28, 29, 30, 31, 32, 33, 34, 35, 36, 37, 38, 39, 40, 41, 42, 43, 44, 45, 46, 47, 48, 49, 50, 51, 52, 53, 54, 55, 56, 57, 58, 59, 60, 61, 62, 63, 64, 65, 66, 67, 68, 69, 70, 71, 72, 73, 74, 75, 76, 77, 78, 79, 80, 81, 82, 83, 84, 85, 86, 87, 88, 89, 90, 91, 92, 93, 94, 95, 96, 97, 98, 99, 100, 101, 102, 103, 104, 105, 106, 107, 108, 109, 110, 111, 112, 113, 114, 115, 116, 117, 577, 579, 581, 583, 585, 587, 589, 591, 593, 595, 597, 599, 601, 603, 605, 607, 609, 611, 613, 615, 617, 619, 621, 623, 625, or 627, a variant, derivative, orthologue, paralogue or homologue thereof, in which:

[1004] the amino acid at Mutated site 4 is Asp, and the amino acid at Mutated site 5 is Pro.

[1005] In another preferred embodiment, the mutated PPO comprises a sequence of SEQ ID NO: 1, 2, 3, 4, 5, 6, 7, 8, 9, 10, 11, 12, 13, 14, 15, 16, 17, 18, 19, 20, 21, 22, 23, 24, 25, 26, 27, 28, 29, 30, 31, 32, 33, 34, 35, 36, 37, 38, 39, 40, 41, 42, 43, 44, 45, 46, 47, 48, 49, 50, 51, 52, 53, 54, 55, 56, 57, 58, 59, 60, 61, 62, 63, 64, 65, 66, 67, 68, 69, 70, 71, 72, 73, 74, 75, 76, 77, 78, 79, 80, 81, 82, 83, 84, 85, 86, 87, 88, 89, 90, 91, 92, 93, 94, 95, 96, 97, 98, 99, 100, 101, 102, 103, 104, 105, 106, 107, 108, 109, 110, 111, 112, 113, 114, 115, 116, 117, 577, 579, 581, 583, 585, 587, 589, 591, 593, 595, 597, 599, 601, 603, 605, 607, 609, 611, 613, 615, 617, 619, 621, 623, 625, or 627, a variant, derivative, orthologue, paralogue or homologue thereof, in which:

[1006] the amino acid at Mutated site 4 is Asp, and the amino acid at Mutated site 5 is Arg.

[1007] In another preferred embodiment, the mutated PPO comprises a sequence of SEQ ID NO: 1, 2, 3, 4, 5, 6, 7, 8, 9, 10, 11, 12, 13, 14, 15, 16, 17, 18, 19, 20, 21, 22, 23, 24, 25, 26, 27, 28, 29, 30, 31, 32, 33, 34, 35, 36, 37, 38, 39, 40, 41, 42, 43, 44, 45, 46, 47, 48, 49, 50, 51, 52, 53, 54, 55, 56, 57, 58, 59, 60, 61, 62, 63, 64, 65, 66, 67, 68, 69, 70, 71, 72, 73, 74, 75, 76, 77, 78, 79, 80, 81, 82, 83, 84, 85, 86, 87, 88, 89, 90, 91, 92, 93, 94, 95, 96, 97, 98, 99, 100, 101, 102, 103, 104, 105, 106, 107, 108, 109, 110, 111, 112, 113, 114, 115, 116, 117, 577, 579, 581, 583, 585, 587, 589, 591, 593, 595, 597, 599, 601, 603, 605, 607, 609, 611, 613, 615, 617, 619, 621, 623, 625, or 627, a variant, derivative, orthologue, paralogue or homologue thereof, in which:

[1008] the amino acid at Mutated site 4 is Asp, and the amino acid at Mutated site 5 is Tyr.

[1009] In another preferred embodiment, the mutated PPO comprises a sequence of SEQ ID NO: 1, 2, 3, 4, 5, 6, 7, 8, 9, 10, 11, 12, 13, 14, 15, 16, 17, 18, 19, 20, 21, 22, 23, 24, 25, 26, 27, 28, 29, 30, 31, 32, 33, 34, 35, 36, 37, 38, 39, 40, 41, 42, 43, 44, 45, 46, 47, 48, 49, 50, 51, 52, 53, 54, 55, 56, 57, 58, 59, 60, 61, 62, 63, 64, 65, 66, 67, 68, 69, 70, 71, 72, 73, 74, 75, 76, 77, 78, 79, 80, 81, 82, 83, 84, 85, 86, 87, 88, 89, 90, 91, 92, 93, 94, 95, 96, 97, 98, 99, 100, 101, 102, 103, 104, 105, 106, 107, 108, 109, 110, 111, 112, 113, 114, 115, 116, 117, 577, 579, 581, 583, 585, 587, 589, 591, 593, 595, 597, 599, 601, 603, 605, 607, 609, 611, 613, 615, 617, 619, 621, 623, 625, or 627, a variant, derivative, orthologue, paralogue or homologue thereof, in which:

[1010] the amino acid at Mutated site 4 is Asp, and the amino acid at Mutated site 5 is Trp.

[1011] In another preferred embodiment, the mutated PPO comprises a sequence of SEQ ID NO: 1, 2, 3, 4, 5, 6, 7, 8, 9, 10, 11, 12, 13, 14, 15, 16, 17, 18, 19, 20, 21, 22, 23, 24, 25, 26, 27, 28, 29, 30, 31, 32, 33, 34, 35, 36, 37, 38, 39, 40, 41, 42, 43, 44, 45, 46, 47, 48, 49, 50, 51, 52, 53, 54, 55, 56, 57, 58, 59, 60, 61, 62, 63, 64, 65, 66, 67, 68, 69, 70, 71, 72, 73, 74, 75, 76, 77, 78, 79, 80, 81, 82, 83, 84, 85, 86, 87, 88, 89, 90, 91, 92, 93, 94, 95, 96, 97, 98, 99, 100, 101, 102, 103, 104, 105, 106, 107, 108, 109, 110, 111, 112, 113, 114, 115, 116, 117, 577, 579, 581, 583, 585, 587, 589, 591, 593, 595, 597, 599, 601, 603, 605, 607, 609, 611, 613, 615, 617, 619, 621, 623, 625, or 627, a variant, derivative, orthologue, paralogue or homologue thereof, in which:

[1012] the amino acid at Mutated site 4 is Glu, and the amino acid at Mutated site 5 is Ala.

[1013] In another preferred embodiment, the mutated PPO comprises a sequence of SEQ ID NO: 1, 2, 3, 4, 5, 6, 7, 8, 9, 10, 11, 12, 13, 14, 15, 16, 17, 18, 19, 20, 21, 22, 23, 24, 25, 26, 27, 28, 29, 30, 31, 32, 33, 34, 35, 36, 37, 38, 39, 40, 41, 42, 43, 44, 45, 46, 47, 48, 49, 50, 51, 52, 53, 54, 55, 56, 57, 58, 59, 60, 61, 62, 63, 64, 65, 66, 67, 68, 69, 70, 71, 72, 73, 74, 75, 76, 77, 78, 79, 80, 81, 82, 83, 84, 85, 86, 87, 88, 89, 90, 91, 92, 93, 94, 95, 96, 97, 98, 99, 100, 101, 102, 103, 104, 105, 106, 107, 108, 109, 110, 111, 112, 113, 114, 115, 116, 117, 577, 579, 581, 583, 585, 587, 589, 591, 593, 595, 597, 599, 601, 603, 605, 607, 609, 611, 613, 615, 617, 619, 621, 623, 625, or 627, a variant, derivative, orthologue, paralogue or homologue thereof, in which:

[1014] the amino acid at Mutated site 4 is Glu, and the amino acid at Mutated site 5 is Leu.

[1015] In another preferred embodiment, the mutated PPO comprises a sequence of SEQ ID NO: 1, 2, 3, 4, 5, 6, 7, 8, 9, 10, 11, 12, 13, 14, 15, 16, 17, 18, 19, 20, 21, 22, 23, 24, 25, 26, 27, 28, 29, 30, 31, 32, 33, 34, 35, 36, 37, 38, 39, 40, 41, 42, 43, 44, 45, 46, 47, 48, 49, 50, 51, 52, 53, 54, 55, 56, 57, 58, 59, 60, 61, 62, 63, 64, 65, 66, 67, 68, 69, 70, 71, 72, 73, 74, 75, 76, 77, 78, 79, 80, 81, 82, 83, 84, 85, 86, 87, 88, 89, 90, 91, 92, 93, 94, 95, 96, 97, 98, 99, 100, 101, 102, 103, 104, 105, 106, 107, 108, 109, 110, 111, 112, 113, 114, 115, 116, 117, 577, 579, 581, 583, 585, 587, 589, 591, 593, 595, 597, 599, 601, 603, 605, 607, 609, 611, 613, 615, 617, 619, 621, 623, 625, or 627, a variant, derivative, orthologue, paralogue or homologue thereof, in which:

[1016] the amino acid at Mutated site 4 is Glu, and the amino acid at Mutated site 5 is Val.

[1017] In another preferred embodiment, the mutated PPO comprises a sequence of SEQ ID NO: 1, 2, 3, 4, 5, 6, 7, 8, 9, 10, 11, 12, 13, 14, 15, 16, 17, 18, 19, 20, 21, 22, 23, 24, 25, 26, 27, 28, 29, 30, 31, 32, 33, 34, 35, 36, 37, 38, 39, 40, 41, 42, 43, 44, 45, 46, 47, 48, 49, 50, 51, 52, 53, 54, 55, 56, 57, 58, 59, 60, 61, 62, 63, 64, 65, 66, 67, 68, 69, 70, 71, 72, 73, 74, 75, 76, 77, 78, 79, 80, 81, 82, 83, 84, 85, 86, 87, 88, 89, 90, 91, 92, 93, 94, 95, 96, 97, 98, 99, 100, 101, 102, 103, 104, 105, 106, 107, 108, 109, 110, 111, 112, 113, 114, 115, 116, 117, 577, 579, 581, 583, 585, 587, 589, 591, 593, 595, 597, 599, 601, 603, 605, 607, 609, 611, 613, 615, 617, 619, 621, 623, 625, or 627, a variant, derivative, orthologue, paralogue or homologue thereof, in which:

[1018] the amino acid at Mutated site 4 is Glu, and the amino acid at Mutated site 5 is Ile.

[1019] In another preferred embodiment, the mutated PPO comprises a sequence of SEQ ID NO: 1, 2, 3, 4, 5, 6, 7, 8, 9, 10, 11, 12, 13, 14, 15, 16, 17, 18, 19, 20, 21, 22, 23, 24, 25, 26, 27, 28, 29, 30, 31, 32, 33, 34, 35, 36, 37, 38, 39, 40, 41, 42, 43, 44, 45, 46, 47, 48, 49, 50, 51, 52, 53, 54, 55, 56, 57, 58, 59, 60, 61, 62, 63, 64, 65, 66, 67, 68, 69, 70, 71, 72, 73, 74, 75, 76, 77, 78, 79, 80, 81, 82, 83, 84, 85, 86, 87, 88, 89, 90, 91, 92, 93, 94, 95, 96, 97, 98, 99, 100, 101, 102, 103, 104, 105, 106, 107, 108, 109, 110, 111, 112, 113, 114, 115, 116, 117, 577, 579, 581, 583, 585, 587, 589, 591, 593, 595, 597, 599, 601, 603, 605, 607, 609, 611, 613, 615, 617, 619, 621, 623, 625, or 627, a variant, derivative, orthologue, paralogue or homologue thereof, in which:

[1020] the amino acid at Mutated site 4 is Glu, and the amino acid at Mutated site 5 is Met.

[1021] In another preferred embodiment, the mutated PPO comprises a sequence of SEQ ID NO: 1, 2, 3, 4, 5, 6, 7, 8, 9, 10, 11, 12, 13, 14, 15, 16, 17, 18, 19, 20, 21, 22, 23, 24, 25, 26, 27, 28, 29, 30, 31, 32, 33, 34, 35, 36, 37, 38, 39, 40, 41, 42, 43, 44, 45, 46, 47, 48, 49, 50, 51, 52, 53, 54, 55, 56, 57, 58, 59, 60, 61, 62, 63, 64, 65, 66, 67, 68, 69, 70, 71, 72, 73, 74, 75, 76, 77, 78, 79, 80, 81, 82, 83, 84, 85, 86, 87, 88, 89, 90, 91, 92, 93, 94, 95, 96, 97, 98, 99, 100, 101, 102, 103, 104, 105, 106, 107, 108, 109, 110, 111, 112, 113, 114, 115, 116, 117, 577, 579, 581, 583, 585, 587, 589, 591, 593, 595, 597, 599, 601, 603, 605, 607, 609, 611, 613, 615, 617, 619, 621, 623, 625, or 627, a variant, derivative, orthologue, paralogue or homologue thereof, in which:

[1022] the amino acid at Mutated site 4 is Glu, and the amino acid at Mutated site 5 is His.

[1023] In another preferred embodiment, the mutated PPO comprises a sequence of SEQ ID NO: 1, 2, 3, 4, 5, 6, 7, 8, 9, 10, 11, 12, 13, 14, 15, 16, 17, 18, 19, 20, 21, 22, 23, 24, 25, 26, 27, 28, 29, 30, 31, 32, 33, 34, 35, 36, 37, 38, 39, 40, 41, 42, 43, 44, 45, 46, 47, 48, 49, 50, 51, 52, 53, 54, 55, 56, 57, 58, 59, 60, 61, 62, 63, 64, 65, 66, 67, 68, 69, 70, 71, 72, 73, 74, 75, 76, 77, 78, 79, 80, 81, 82, 83, 84, 85, 86, 87, 88, 89, 90, 91, 92, 93, 94, 95, 96, 97, 98, 99, 100, 101, 102, 103, 104, 105, 106, 107, 108, 109, 110, 111, 112, 113, 114, 115, 116, 117, 577, 579, 581, 583, 585, 587, 589, 591, 593, 595, 597, 599, 601, 603, 605, 607, 609, 611, 613, 615, 617, 619, 621, 623, 625, or 627, a variant, derivative, orthologue, paralogue or homologue thereof, in which:

[1024] the amino acid at Mutated site 4 is Glu, and the amino acid at Mutated site 5 is Lys.

[1025] In another preferred embodiment, the mutated PPO comprises a sequence of SEQ ID NO: 1, 2, 3, 4, 5, 6, 7, 8, 9, 10, 11, 12, 13, 14, 15, 16, 17, 18, 19, 20, 21, 22, 23, 24, 25, 26, 27, 28, 29, 30, 31, 32, 33, 34, 35, 36, 37, 38, 39, 40, 41, 42, 43, 44, 45, 46, 47, 48, 49, 50, 51, 52, 53, 54, 55, 56, 57, 58, 59, 60, 61, 62, 63, 64, 65, 66, 67, 68, 69, 70, 71, 72, 73, 74, 75, 76, 77, 78, 79, 80, 81, 82, 83, 84, 85, 86, 87, 88, 89, 90, 91, 92, 93, 94, 95, 96, 97, 98, 99, 100, 101, 102, 103, 104, 105, 106, 107, 108, 109, 110, 111, 112, 113, 114, 115, 116, 117, 577, 579, 581, 583, 585, 587, 589, 591, 593, 595, 597, 599, 601, 603, 605, 607, 609, 611, 613, 615, 617, 619, 621, 623, 625, or 627, a variant, derivative, orthologue, paralogue or homologue thereof, in which:

[1026] the amino acid at Mutated site 4 is Glu, and the amino acid at Mutated site 5 is Asp.

[1027] In another preferred embodiment, the mutated PPO comprises a sequence of SEQ ID NO: 1, 2, 3, 4, 5, 6, 7, 8, 9, 10, 11, 12, 13, 14, 15, 16, 17, 18, 19, 20, 21, 22, 23, 24, 25, 26, 27, 28, 29, 30, 31, 32, 33, 34, 35, 36, 37, 38, 39, 40, 41, 42, 43, 44, 45, 46, 47, 48, 49, 50, 51, 52, 53, 54, 55, 56, 57, 58, 59, 60, 61, 62, 63, 64, 65, 66, 67, 68, 69, 70, 71, 72, 73, 74, 75, 76, 77, 78, 79, 80, 81, 82, 83, 84, 85, 86, 87, 88, 89, 90, 91, 92, 93, 94, 95, 96, 97, 98, 99, 100, 101, 102, 103, 104, 105, 106, 107, 108, 109, 110, 111, 112, 113, 114, 115, 116, 117, 577, 579, 581, 583, 585, 587, 589, 591, 593, 595, 597, 599, 601, 603, 605, 607, 609, 611, 613, 615, 617, 619, 621, 623, 625, or 627, a variant, derivative, orthologue, paralogue or homologue thereof, in which:

[1028] the amino acid at Mutated site 4 is Glu, and the amino acid at Mutated site 5 is Glu.

[1029] In another preferred embodiment, the mutated PPO comprises a sequence of SEQ ID NO: 1, 2, 3, 4, 5, 6, 7, 8, 9, 10, 11, 12, 13, 14, 15, 16, 17, 18, 19, 20, 21, 22, 23, 24, 25, 26, 27, 28, 29, 30, 31, 32, 33, 34, 35, 36, 37, 38, 39, 40, 41, 42, 43, 44, 45, 46, 47, 48, 49, 50, 51, 52, 53, 54, 55, 56, 57, 58, 59, 60, 61, 62, 63, 64, 65, 66, 67, 68, 69, 70, 71, 72, 73, 74, 75, 76, 77, 78, 79, 80, 81, 82, 83, 84, 85, 86, 87, 88, 89, 90, 91, 92, 93, 94, 95, 96, 97, 98, 99, 100, 101, 102, 103, 104, 105, 106, 107, 108, 109, 110, 111, 112, 113, 114, 115, 116, 117, 577, 579, 581, 583, 585, 587, 589, 591, 593, 595, 597, 599, 601, 603, 605, 607, 609, 611, 613, 615, 617, 619, 621, 623, 625, or 627, a variant, derivative, orthologue, paralogue or homologue thereof, in which:

[1030] the amino acid at Mutated site 4 is Glu, and the amino acid at Mutated site 5 is Ser.

[1031] In another preferred embodiment, the mutated PPO comprises a sequence of SEQ ID NO: 1, 2, 3, 4, 5, 6, 7, 8, 9, 10, 11, 12, 13, 14, 15, 16, 17, 18, 19, 20, 21, 22, 23, 24, 25, 26, 27, 28, 29, 30, 31, 32, 33, 34, 35, 36, 37, 38, 39, 40, 41, 42, 43, 44, 45, 46, 47, 48, 49, 50, 51, 52, 53, 54, 55, 56, 57, 58, 59, 60, 61, 62, 63, 64, 65, 66, 67, 68, 69, 70, 71, 72, 73, 74, 75, 76, 77, 78, 79, 80, 81, 82, 83, 84, 85, 86, 87, 88, 89, 90, 91, 92, 93, 94, 95, 96, 97, 98, 99, 100, 101, 102, 103, 104, 105, 106, 107, 108, 109, 110, 111, 112, 113, 114, 115, 116, 117, 577, 579, 581, 583, 585, 587, 589, 591, 593, 595, 597, 599, 601, 603, 605, 607, 609, 611, 613, 615, 617, 619, 621, 623, 625, or 627, a variant, derivative, orthologue, paralogue or homologue thereof, in which:

[1032] the amino acid at Mutated site 4 is Glu, and the amino acid at Mutated site 5 is Thr.

[1033] In another preferred embodiment, the mutated PPO comprises a sequence of SEQ ID NO: 1, 2, 3, 4, 5, 6, 7, 8, 9, 10, 11, 12, 13, 14, 15, 16, 17, 18, 19, 20, 21, 22, 23, 24, 25, 26, 27, 28, 29, 30, 31, 32, 33, 34, 35, 36, 37, 38, 39, 40, 41, 42, 43, 44, 45, 46, 47, 48, 49, 50, 51, 52, 53, 54, 55, 56, 57, 58, 59, 60, 61, 62, 63, 64, 65, 66, 67, 68, 69, 70, 71, 72, 73, 74, 75, 76, 77, 78, 79, 80, 81, 82, 83, 84, 85, 86, 87, 88, 89, 90, 91, 92, 93, 94, 95, 96, 97, 98, 99, 100, 101, 102, 103, 104, 105, 106, 107, 108, 109, 110, 111, 112, 113, 114, 115, 116, 117, 577, 579, 581, 583, 585, 587, 589, 591, 593, 595, 597, 599, 601, 603, 605, 607, 609, 611, 613, 615, 617, 619, 621, 623, 625, or 627, a variant, derivative, orthologue, paralogue or homologue thereof, in which:

[1034] the amino acid at Mutated site 4 is Glu, and the amino acid at Mutated site 5 is Asn.

[1035] In another preferred embodiment, the mutated PPO comprises a sequence of SEQ ID NO: 1, 2, 3, 4, 5, 6, 7, 8, 9, 10, 11, 12, 13, 14, 15, 16, 17, 18, 19, 20, 21, 22, 23, 24, 25, 26, 27, 28, 29, 30, 31, 32, 33, 34, 35, 36, 37, 38, 39, 40, 41, 42, 43, 44, 45, 46, 47, 48, 49, 50, 51, 52, 53, 54, 55, 56, 57, 58, 59, 60, 61, 62, 63, 64, 65, 66, 67, 68, 69, 70, 71, 72, 73, 74, 75, 76, 77, 78, 79, 80, 81, 82, 83, 84, 85, 86, 87, 88, 89, 90, 91, 92, 93, 94, 95, 96, 97, 98, 99, 100, 101, 102, 103, 104, 105, 106, 107, 108, 109, 110, 111, 112, 113, 114, 115, 116, 117, 577, 579, 581, 583, 585, 587, 589, 591, 593, 595, 597, 599, 601, 603, 605, 607, 609, 611, 613, 615, 617, 619, 621, 623, 625, or 627, a variant, derivative, orthologue, paralogue or homologue thereof, in which:

[1036] the amino acid at Mutated site 4 is Glu, and the amino acid at Mutated site 5 is Gln.

[1037] In another preferred embodiment, the mutated PPO comprises a sequence of SEQ ID NO: 1, 2, 3, 4, 5, 6, 7, 8, 9, 10, 11, 12, 13, 14, 15, 16, 17, 18, 19, 20, 21, 22, 23, 24, 25, 26, 27, 28, 29, 30, 31, 32, 33, 34, 35, 36, 37, 38, 39, 40, 41, 42, 43, 44, 45, 46, 47, 48, 49, 50, 51, 52, 53, 54, 55, 56, 57, 58, 59, 60, 61, 62, 63, 64, 65, 66, 67, 68, 69, 70, 71, 72, 73, 74, 75, 76, 77, 78, 79, 80, 81, 82, 83, 84, 85, 86, 87, 88, 89, 90, 91, 92, 93, 94, 95, 96, 97, 98, 99, 100, 101, 102, 103, 104, 105, 106, 107, 108, 109, 110, 111, 112, 113, 114, 115, 116, 117, 577, 579, 581, 583, 585, 587, 589, 591, 593, 595, 597, 599, 601, 603, 605, 607, 609, 611, 613, 615, 617, 619, 621, 623, 625, or 627, a variant, derivative, orthologue, paralogue or homologue thereof, in which:

[1038] the amino acid at Mutated site 4 is Glu, and the amino acid at Mutated site 5 is Cys.

[1039] In another preferred embodiment, the mutated PPO comprises a sequence of SEQ ID NO: 1, 2, 3, 4, 5, 6, 7, 8, 9, 10, 11, 12, 13, 14, 15, 16, 17, 18, 19, 20, 21, 22, 23, 24, 25, 26, 27, 28, 29, 30, 31, 32, 33, 34, 35, 36, 37, 38, 39, 40, 41, 42, 43, 44, 45, 46, 47, 48, 49, 50, 51, 52, 53, 54, 55, 56, 57, 58, 59, 60, 61, 62, 63, 64, 65, 66, 67, 68, 69, 70, 71, 72, 73, 74, 75, 76, 77, 78, 79, 80, 81, 82, 83, 84, 85, 86, 87, 88, 89, 90, 91, 92, 93, 94, 95, 96, 97, 98, 99, 100, 101, 102, 103, 104, 105, 106, 107, 108, 109, 110, 111, 112, 113, 114, 115, 116, 117, 577, 579, 581, 583, 585, 587, 589, 591, 593, 595, 597, 599, 601, 603, 605, 607, 609, 611, 613, 615, 617, 619, 621, 623, 625, or 627, a variant, derivative, orthologue, paralogue or homologue thereof, in which:

[1040] the amino acid at Mutated site 4 is Glu, and the amino acid at Mutated site 5 is Gly.

[1041] In another preferred embodiment, the mutated PPO comprises a sequence of SEQ ID NO: 1, 2, 3, 4, 5, 6, 7, 8, 9, 10, 11, 12, 13, 14, 15, 16, 17, 18, 19, 20, 21, 22, 23, 24, 25, 26, 27, 28, 29, 30, 31, 32, 33, 34, 35, 36, 37, 38, 39, 40, 41, 42, 43, 44, 45, 46, 47, 48, 49, 50, 51, 52, 53, 54, 55, 56, 57, 58, 59, 60, 61, 62, 63, 64, 65, 66, 67, 68, 69, 70, 71, 72, 73, 74, 75, 76, 77, 78, 79, 80, 81, 82, 83, 84, 85, 86, 87, 88, 89, 90, 91, 92, 93, 94, 95, 96, 97, 98, 99, 100, 101, 102, 103, 104, 105, 106, 107, 108, 109, 110, 111, 112, 113, 114, 115, 116, 117, 577, 579, 581, 583, 585, 587, 589, 591, 593, 595, 597, 599, 601, 603, 605, 607, 609, 611, 613, 615, 617, 619, 621, 623, 625, or 627, a variant, derivative, orthologue, paralogue or homologue thereof, in which:

[1042] the amino acid at Mutated site 4 is Glu, and the amino acid at Mutated site 5 is Pro.

[1043] In another preferred embodiment, the mutated PPO comprises a sequence of SEQ ID NO: 1, 2, 3, 4, 5, 6, 7, 8, 9, 10, 11, 12, 13, 14, 15, 16, 17, 18, 19, 20, 21, 22, 23, 24, 25, 26, 27, 28, 29, 30, 31, 32, 33, 34, 35, 36, 37, 38, 39, 40, 41, 42, 43, 44, 45, 46, 47, 48, 49, 50, 51, 52, 53, 54, 55, 56, 57, 58, 59, 60, 61, 62, 63, 64, 65, 66, 67, 68, 69, 70, 71, 72, 73, 74, 75, 76, 77, 78, 79, 80, 81, 82, 83, 84, 85, 86, 87, 88, 89, 90, 91, 92, 93, 94, 95, 96, 97, 98, 99, 100, 101, 102, 103, 104, 105, 106, 107, 108, 109, 110, 111, 112, 113, 114, 115, 116, 117, 577, 579, 581, 583, 585, 587, 589, 591, 593, 595, 597, 599, 601, 603, 605, 607, 609, 611, 613, 615, 617, 619, 621, 623, 625, or 627, a variant, derivative, orthologue, paralogue or homologue thereof, in which:

[1044] the amino acid at Mutated site 4 is Glu, and the amino acid at Mutated site 5 is Arg.

[1045] In another preferred embodiment, the mutated PPO comprises a sequence of SEQ ID NO: 1, 2, 3, 4, 5, 6, 7, 8, 9, 10, 11, 12, 13, 14, 15, 16, 17, 18, 19, 20, 21, 22, 23, 24, 25, 26, 27, 28, 29, 30, 31, 32, 33, 34, 35, 36, 37, 38, 39, 40, 41, 42, 43, 44, 45, 46, 47, 48, 49, 50, 51, 52, 53, 54, 55, 56, 57, 58, 59, 60, 61, 62, 63, 64, 65, 66, 67, 68, 69, 70, 71, 72, 73, 74, 75, 76, 77, 78, 79, 80, 81, 82, 83, 84, 85, 86, 87, 88, 89, 90, 91, 92, 93, 94, 95, 96, 97, 98, 99, 100, 101, 102, 103, 104, 105, 106, 107, 108, 109, 110, 111, 112, 113, 114, 115, 116, 117, 577, 579, 581, 583, 585, 587, 589, 591, 593, 595, 597, 599, 601, 603, 605, 607, 609, 611, 613, 615, 617, 619, 621, 623, 625, or 627, a variant, derivative, orthologue, paralogue or homologue thereof, in which:

[1046] the amino acid at Mutated site 4 is Glu, and the amino acid at Mutated site 5 is Tyr.

[1047] In another preferred embodiment, the mutated PPO comprises a sequence of SEQ ID NO: 1, 2, 3, 4, 5, 6, 7, 8, 9, 10, 11, 12, 13, 14, 15, 16, 17, 18, 19, 20, 21, 22, 23, 24, 25, 26, 27, 28, 29, 30, 31, 32, 33, 34, 35, 36, 37, 38, 39, 40, 41, 42, 43, 44, 45, 46, 47, 48, 49, 50, 51, 52, 53, 54, 55, 56, 57, 58, 59, 60, 61, 62, 63, 64, 65, 66, 67, 68, 69, 70, 71, 72, 73, 74, 75, 76, 77, 78, 79, 80, 81, 82, 83, 84, 85, 86, 87, 88, 89, 90, 91, 92, 93, 94, 95, 96, 97, 98, 99, 100, 101, 102, 103, 104, 105, 106, 107, 108, 109, 110, 111, 112, 113, 114, 115, 116, 117, 577, 579, 581, 583, 585, 587, 589, 591, 593, 595, 597, 599, 601, 603, 605, 607, 609, 611, 613, 615, 617, 619, 621, 623, 625, or 627, a variant, derivative, orthologue, paralogue or homologue thereof, in which:

[1048] the amino acid at Mutated site 4 is Glu, and the amino acid at Mutated site 5 is Trp.

[1049] In another preferred embodiment, the mutated PPO comprises a sequence of SEQ ID NO: 1, 2, 3, 4, 5, 6, 7, 8, 9, 10, 11, 12, 13, 14, 15, 16, 17, 18, 19, 20, 21, 22, 23, 24, 25, 26, 27, 28, 29, 30, 31, 32, 33, 34, 35, 36, 37, 38, 39, 40, 41, 42, 43, 44, 45, 46, 47, 48, 49, 50, 51, 52, 53, 54, 55, 56, 57, 58, 59, 60, 61, 62, 63, 64, 65, 66, 67, 68, 69, 70, 71, 72, 73, 74, 75, 76, 77, 78, 79, 80, 81, 82, 83, 84, 85, 86, 87, 88, 89, 90, 91, 92, 93, 94, 95, 96, 97, 98, 99, 100, 101, 102, 103, 104, 105, 106, 107, 108, 109, 110, 111, 112, 113, 114, 115, 116, 117, 577, 579, 581, 583, 585, 587, 589, 591, 593, 595, 597, 599, 601, 603, 605, 607, 609, 611, 613, 615, 617, 619, 621, 623, 625, or 627, a variant, derivative, orthologue, paralogue or homologue thereof, in which:

[1050] the amino acid at Mutated site 4 is Ser, and the amino acid at Mutated site 5 is Ala.

[1051] In another preferred embodiment, the mutated PPO comprises a sequence of SEQ ID NO: 1, 2, 3, 4, 5, 6, 7, 8, 9, 10, 11, 12, 13, 14, 15, 16, 17, 18, 19, 20, 21, 22, 23, 24, 25, 26, 27, 28, 29, 30, 31, 32, 33, 34, 35, 36, 37, 38, 39, 40, 41, 42, 43, 44, 45, 46, 47, 48, 49, 50, 51, 52, 53, 54, 55, 56, 57, 58, 59, 60, 61, 62, 63, 64, 65, 66, 67, 68, 69, 70, 71, 72, 73, 74, 75, 76, 77, 78, 79, 80, 81, 82, 83, 84, 85, 86, 87, 88, 89, 90, 91, 92, 93, 94, 95, 96, 97, 98, 99, 100, 101, 102, 103, 104, 105, 106, 107, 108, 109, 110, 111, 112, 113, 114, 115, 116, 117, 577, 579, 581, 583, 585, 587, 589, 591, 593, 595, 597, 599, 601, 603, 605, 607, 609, 611, 613, 615, 617, 619, 621, 623, 625, or 627, a variant, derivative, orthologue, paralogue or homologue thereof, in which:

[1052] the amino acid at Mutated site 4 is Ser, and the amino acid at Mutated site 5 is Leu.

[1053] In another preferred embodiment, the mutated PPO comprises a sequence of SEQ ID NO: 1, 2, 3, 4, 5, 6, 7, 8, 9, 10, 11, 12, 13, 14, 15, 16, 17, 18, 19, 20, 21, 22, 23, 24, 25, 26, 27, 28, 29, 30, 31, 32, 33, 34, 35, 36, 37, 38, 39, 40, 41, 42, 43, 44, 45, 46, 47, 48, 49, 50, 51, 52, 53, 54, 55, 56, 57, 58, 59, 60, 61, 62, 63, 64, 65, 66, 67, 68, 69, 70, 71, 72, 73, 74, 75, 76, 77, 78, 79, 80, 81, 82, 83, 84, 85, 86, 87, 88, 89, 90, 91, 92, 93, 94, 95, 96, 97, 98, 99, 100, 101, 102, 103, 104, 105, 106, 107, 108, 109, 110, 111, 112, 113, 114, 115, 116, 117, 577, 579, 581, 583, 585, 587, 589, 591, 593, 595, 597, 599, 601, 603, 605, 607, 609, 611, 613, 615, 617, 619, 621, 623, 625, or 627, a variant, derivative, orthologue, paralogue or homologue thereof, in which:

[1054] the amino acid at Mutated site 4 is Ser, and the amino acid at Mutated site 5 is Val.

[1055] In another preferred embodiment, the mutated PPO comprises a sequence of SEQ ID NO: 1, 2, 3, 4, 5, 6, 7, 8, 9, 10, 11, 12, 13, 14, 15, 16, 17, 18, 19, 20, 21, 22, 23, 24, 25, 26, 27, 28, 29, 30, 31, 32, 33, 34, 35, 36, 37, 38, 39, 40, 41, 42, 43, 44, 45, 46, 47, 48, 49, 50, 51, 52, 53, 54, 55, 56, 57, 58, 59, 60, 61, 62, 63, 64, 65, 66, 67, 68, 69, 70, 71, 72, 73, 74, 75, 76, 77, 78, 79, 80, 81, 82, 83, 84, 85, 86, 87, 88, 89, 90, 91, 92, 93, 94, 95, 96, 97, 98, 99, 100, 101, 102, 103, 104, 105, 106, 107, 108, 109, 110, 111, 112, 113, 114, 115, 116, 117, 577, 579, 581, 583, 585, 587, 589, 591, 593, 595, 597, 599, 601, 603, 605, 607, 609, 611, 613, 615, 617, 619, 621, 623, 625, or 627, a variant, derivative, orthologue, paralogue or homologue thereof, in which:

[1056] the amino acid at Mutated site 4 is Ser, and the amino acid at Mutated site 5 is Ile.

[1057] In another preferred embodiment, the mutated PPO comprises a sequence of SEQ ID NO: 1, 2, 3, 4, 5, 6, 7, 8, 9, 10, 11, 12, 13, 14, 15, 16, 17, 18, 19, 20, 21, 22, 23, 24, 25, 26, 27, 28, 29, 30, 31, 32, 33, 34, 35, 36, 37, 38, 39, 40, 41, 42, 43, 44, 45, 46, 47, 48, 49, 50, 51, 52, 53, 54, 55, 56, 57, 58, 59, 60, 61, 62, 63, 64, 65, 66, 67, 68, 69, 70, 71, 72, 73, 74, 75, 76, 77, 78, 79, 80, 81, 82, 83, 84, 85, 86, 87, 88, 89, 90, 91, 92, 93, 94, 95, 96, 97, 98, 99, 100, 101, 102, 103, 104, 105, 106, 107, 108, 109, 110, 111, 112, 113, 114, 115, 116, 117, 577, 579, 581, 583, 585, 587, 589, 591, 593, 595, 597, 599, 601, 603, 605, 607, 609, 611, 613, 615, 617, 619, 621, 623, 625, or 627, a variant, derivative, orthologue, paralogue or homologue thereof, in which:

[1058] the amino acid at Mutated site 4 is Ser, and the amino acid at Mutated site 5 is Met.

[1059] In another preferred embodiment, the mutated PPO comprises a sequence of SEQ ID NO: 1, 2, 3, 4, 5, 6, 7, 8, 9, 10, 11, 12, 13, 14, 15, 16, 17, 18, 19, 20, 21, 22, 23, 24, 25, 26, 27, 28, 29, 30, 31, 32, 33, 34, 35, 36, 37, 38, 39, 40, 41, 42, 43, 44, 45, 46, 47, 48, 49, 50, 51, 52, 53, 54, 55, 56, 57, 58, 59, 60, 61, 62, 63, 64, 65, 66, 67, 68, 69, 70, 71, 72, 73, 74, 75, 76, 77, 78, 79, 80, 81, 82, 83, 84, 85, 86, 87, 88, 89, 90, 91, 92, 93, 94, 95, 96, 97, 98, 99, 100, 101, 102, 103, 104, 105, 106, 107, 108, 109, 110, 111, 112, 113, 114, 115, 116, 117, 577, 579, 581, 583, 585, 587, 589, 591, 593, 595, 597, 599, 601, 603, 605, 607, 609, 611, 613, 615, 617, 619, 621, 623, 625, or 627, a variant, derivative, orthologue, paralogue or homologue thereof, in which:

[1060] the amino acid at Mutated site 4 is Ser, and the amino acid at Mutated site 5 is His.

[1061] In another preferred embodiment, the mutated PPO comprises a sequence of SEQ ID NO: 1, 2, 3, 4, 5, 6, 7, 8, 9, 10, 11, 12, 13, 14, 15, 16, 17, 18, 19, 20, 21, 22, 23, 24, 25, 26, 27, 28, 29, 30, 31, 32, 33, 34, 35, 36, 37, 38, 39, 40, 41, 42, 43, 44, 45, 46, 47, 48, 49, 50, 51, 52, 53, 54, 55, 56, 57, 58, 59, 60, 61, 62, 63, 64, 65, 66, 67, 68, 69, 70, 71, 72, 73, 74, 75, 76, 77, 78, 79, 80, 81, 82, 83, 84, 85, 86, 87, 88, 89, 90, 91, 92, 93, 94, 95, 96, 97, 98, 99, 100, 101, 102, 103, 104, 105, 106, 107, 108, 109, 110, 111, 112, 113, 114, 115, 116, 117, 577, 579, 581, 583, 585, 587, 589, 591, 593, 595, 597, 599, 601, 603, 605, 607, 609, 611, 613, 615, 617, 619, 621, 623, 625, or 627, a variant, derivative, orthologue, paralogue or homologue thereof, in which:

[1062] the amino acid at Mutated site 4 is Ser, and the amino acid at Mutated site 5 is Lys.

[1063] In another preferred embodiment, the mutated PPO comprises a sequence of SEQ ID NO: 1, 2, 3, 4, 5, 6, 7, 8, 9, 10, 11, 12, 13, 14, 15, 16, 17, 18, 19, 20, 21, 22, 23, 24, 25, 26, 27, 28, 29, 30, 31, 32, 33, 34, 35, 36, 37, 38, 39, 40, 41, 42, 43, 44, 45, 46, 47, 48, 49, 50, 51, 52, 53, 54, 55, 56, 57, 58, 59, 60, 61, 62, 63, 64, 65, 66, 67, 68, 69, 70, 71, 72, 73, 74, 75, 76, 77, 78, 79, 80, 81, 82, 83, 84, 85, 86, 87, 88, 89, 90, 91, 92, 93, 94, 95, 96, 97, 98, 99, 100, 101, 102, 103, 104, 105, 106, 107, 108, 109, 110, 111, 112, 113, 114, 115, 116, 117, 577, 579, 581, 583, 585, 587, 589, 591, 593, 595, 597, 599, 601, 603, 605, 607, 609, 611, 613, 615, 617, 619, 621, 623, 625, or 627, a variant, derivative, orthologue, paralogue or homologue thereof, in which:

[1064] the amino acid at Mutated site 4 is Ser, and the amino acid at Mutated site 5 is Asp.

[1065] In another preferred embodiment, the mutated PPO comprises a sequence of SEQ ID NO: 1, 2, 3, 4, 5, 6, 7, 8, 9, 10, 11, 12, 13, 14, 15, 16, 17, 18, 19, 20, 21, 22, 23, 24, 25, 26, 27, 28, 29, 30, 31, 32, 33, 34, 35, 36, 37, 38, 39, 40, 41, 42, 43, 44, 45, 46, 47, 48, 49, 50, 51, 52, 53, 54, 55, 56, 57, 58, 59, 60, 61, 62, 63, 64, 65, 66, 67, 68, 69, 70, 71, 72, 73, 74, 75, 76, 77, 78, 79, 80, 81, 82, 83, 84, 85, 86, 87, 88, 89, 90, 91, 92, 93, 94, 95, 96, 97, 98, 99, 100, 101, 102, 103, 104, 105, 106, 107, 108, 109, 110, 111, 112, 113, 114, 115, 116, 117, 577, 579, 581, 583, 585, 587, 589, 591, 593, 595, 597, 599, 601, 603, 605, 607, 609, 611, 613, 615, 617, 619, 621, 623, 625, or 627, a variant, derivative, orthologue, paralogue or homologue thereof, in which:

[1066] the amino acid at Mutated site 4 is Ser, and the amino acid at Mutated site 5 is Glu.

[1067] In another preferred embodiment, the mutated PPO comprises a sequence of SEQ ID NO: 1, 2, 3, 4, 5, 6, 7, 8, 9, 10, 11, 12, 13, 14, 15, 16, 17, 18, 19, 20, 21, 22, 23, 24, 25, 26, 27, 28, 29, 30, 31, 32, 33, 34, 35, 36, 37, 38, 39, 40, 41, 42, 43, 44, 45, 46, 47, 48, 49, 50, 51, 52, 53, 54, 55, 56, 57, 58, 59, 60, 61, 62, 63, 64, 65, 66, 67, 68, 69, 70, 71, 72, 73, 74, 75, 76, 77, 78, 79, 80, 81, 82, 83, 84, 85, 86, 87, 88, 89, 90, 91, 92, 93, 94, 95, 96, 97, 98, 99, 100, 101, 102, 103, 104, 105, 106, 107, 108, 109, 110, 111, 112, 113, 114, 115, 116, 117, 577, 579, 581, 583, 585, 587, 589, 591, 593, 595, 597, 599, 601, 603, 605, 607, 609, 611, 613, 615, 617, 619, 621, 623, 625, or 627, a variant, derivative, orthologue, paralogue or homologue thereof, in which:

[1068] the amino acid at Mutated site 4 is Ser, and the amino acid at Mutated site 5 is Ser.

[1069] In another preferred embodiment, the mutated PPO comprises a sequence of SEQ ID NO: 1, 2, 3, 4, 5, 6, 7, 8, 9, 10, 11, 12, 13, 14, 15, 16, 17, 18, 19, 20, 21, 22, 23, 24, 25, 26, 27, 28, 29, 30, 31, 32, 33, 34, 35, 36, 37, 38, 39, 40, 41, 42, 43, 44, 45, 46, 47, 48, 49, 50, 51, 52, 53, 54, 55, 56, 57, 58, 59, 60, 61, 62, 63, 64, 65, 66, 67, 68, 69, 70, 71, 72, 73, 74, 75, 76, 77, 78, 79, 80, 81, 82, 83, 84, 85, 86, 87, 88, 89, 90, 91, 92, 93, 94, 95, 96, 97, 98, 99, 100, 101, 102, 103, 104, 105, 106, 107, 108, 109, 110, 111, 112, 113, 114, 115, 116, 117, 577, 579, 581, 583, 585, 587, 589, 591, 593, 595, 597, 599, 601, 603, 605, 607, 609, 611, 613, 615, 617, 619, 621, 623, 625, or 627, a variant, derivative, orthologue, paralogue or homologue thereof, in which:

[1070] the amino acid at Mutated site 4 is Ser, and the amino acid at Mutated site 5 is Thr.

[1071] In another preferred embodiment, the mutated PPO comprises a sequence of SEQ ID NO: 1, 2, 3, 4, 5, 6, 7, 8, 9, 10, 11, 12, 13, 14, 15, 16, 17, 18, 19, 20, 21, 22, 23, 24, 25, 26, 27, 28, 29, 30, 31, 32, 33, 34, 35, 36, 37, 38, 39, 40, 41, 42, 43, 44, 45, 46, 47, 48, 49, 50, 51, 52, 53, 54, 55, 56, 57, 58, 59, 60, 61, 62, 63, 64, 65, 66, 67, 68, 69, 70, 71, 72, 73, 74, 75, 76, 77, 78, 79, 80, 81, 82, 83, 84, 85, 86, 87, 88, 89, 90, 91, 92, 93, 94, 95, 96, 97, 98, 99, 100, 101, 102, 103, 104, 105, 106, 107, 108, 109, 110, 111, 112, 113, 114, 115, 116, 117, 577, 579, 581, 583, 585, 587, 589, 591, 593, 595, 597, 599, 601, 603, 605, 607, 609, 611, 613, 615, 617, 619, 621, 623, 625, or 627, a variant, derivative, orthologue, paralogue or homologue thereof, in which:

[1072] the amino acid at Mutated site 4 is Ser, and the amino acid at Mutated site 5 is Asn.

[1073] In another preferred embodiment, the mutated PPO comprises a sequence of SEQ ID NO: 1, 2, 3, 4, 5, 6, 7, 8, 9, 10, 11, 12, 13, 14, 15, 16, 17, 18, 19, 20, 21, 22, 23, 24, 25, 26, 27, 28, 29, 30, 31, 32, 33, 34, 35, 36, 37, 38, 39, 40, 41, 42, 43, 44, 45, 46, 47, 48, 49, 50, 51, 52, 53, 54, 55, 56, 57, 58, 59, 60, 61, 62, 63, 64, 65, 66, 67, 68, 69, 70, 71, 72, 73, 74, 75, 76, 77, 78, 79, 80, 81, 82, 83, 84, 85, 86, 87, 88, 89, 90, 91, 92, 93, 94, 95, 96, 97, 98, 99, 100, 101, 102, 103, 104, 105, 106, 107, 108, 109, 110, 111, 112, 113, 114, 115, 116, 117, 577, 579, 581, 583, 585, 587, 589, 591, 593, 595, 597, 599, 601, 603, 605, 607, 609, 611, 613, 615, 617, 619, 621, 623, 625, or 627, a variant, derivative, orthologue, paralogue or homologue thereof, in which:

[1074] the amino acid at Mutated site 4 is Ser, and the amino acid at Mutated site 5 is Gln.

[1075] In another preferred embodiment, the mutated PPO comprises a sequence of SEQ ID NO: 1, 2, 3, 4, 5, 6, 7, 8, 9, 10, 11, 12, 13, 14, 15, 16, 17, 18, 19, 20, 21, 22, 23, 24, 25, 26, 27, 28, 29, 30, 31, 32, 33, 34, 35, 36, 37, 38, 39, 40, 41, 42, 43, 44, 45, 46, 47, 48, 49, 50, 51, 52, 53, 54, 55, 56, 57, 58, 59, 60, 61, 62, 63, 64, 65, 66, 67, 68, 69, 70, 71, 72, 73, 74, 75, 76, 77, 78, 79, 80, 81, 82, 83, 84, 85, 86, 87, 88, 89, 90, 91, 92, 93, 94, 95, 96, 97, 98, 99, 100, 101, 102, 103, 104, 105, 106, 107, 108, 109, 110, 111, 112, 113, 114, 115, 116, 117, 577, 579, 581, 583, 585, 587, 589, 591, 593, 595, 597, 599, 601, 603, 605, 607, 609, 611, 613, 615, 617, 619, 621, 623, 625, or 627, a variant, derivative, orthologue, paralogue or homologue thereof, in which:

[1076] the amino acid at Mutated site 4 is Ser, and the amino acid at Mutated site 5 is Cys.

[1077] In another preferred embodiment, the mutated PPO comprises a sequence of SEQ ID NO: 1, 2, 3, 4, 5, 6, 7, 8, 9, 10, 11, 12, 13, 14, 15, 16, 17, 18, 19, 20, 21, 22, 23, 24, 25, 26, 27, 28, 29, 30, 31, 32, 33, 34, 35, 36, 37, 38, 39, 40, 41, 42, 43, 44, 45, 46, 47, 48, 49, 50, 51, 52, 53, 54, 55, 56, 57, 58, 59, 60, 61, 62, 63, 64, 65, 66, 67, 68, 69, 70, 71, 72, 73, 74, 75, 76, 77, 78, 79, 80, 81, 82, 83, 84, 85, 86, 87, 88, 89, 90, 91, 92, 93, 94, 95, 96, 97, 98, 99, 100, 101, 102, 103, 104, 105, 106, 107, 108, 109, 110, 111, 112, 113, 114, 115, 116, 117, 577, 579, 581, 583, 585, 587, 589, 591, 593, 595, 597, 599, 601, 603, 605, 607, 609, 611, 613, 615, 617, 619, 621, 623, 625, or 627, a variant, derivative, orthologue, paralogue or homologue thereof, in which:

[1078] the amino acid at Mutated site 4 is Ser, and the amino acid at Mutated site 5 is Gly.

[1079] In another preferred embodiment, the mutated PPO comprises a sequence of SEQ ID NO: 1, 2, 3, 4, 5, 6, 7, 8, 9, 10, 11, 12, 13, 14, 15, 16, 17, 18, 19, 20, 21, 22, 23, 24, 25, 26, 27, 28, 29, 30, 31, 32, 33, 34, 35, 36, 37, 38, 39, 40, 41, 42, 43, 44, 45, 46, 47, 48, 49, 50, 51, 52, 53, 54, 55, 56, 57, 58, 59, 60, 61, 62, 63, 64, 65, 66, 67, 68, 69, 70, 71, 72, 73, 74, 75, 76, 77, 78, 79, 80, 81, 82, 83, 84, 85, 86, 87, 88, 89, 90, 91, 92, 93, 94, 95, 96, 97, 98, 99, 100, 101, 102, 103, 104, 105, 106, 107, 108, 109, 110, 111, 112, 113, 114, 115, 116, 117, 577, 579, 581, 583, 585, 587, 589, 591, 593, 595, 597, 599, 601, 603, 605, 607, 609, 611, 613, 615, 617, 619, 621, 623, 625, or 627, a variant, derivative, orthologue, paralogue or homologue thereof, in which:

[1080] the amino acid at Mutated site 4 is Ser, and the amino acid at Mutated site 5 is Pro.

[1081] In another preferred embodiment, the mutated PPO comprises a sequence of SEQ ID NO: 1, 2, 3, 4, 5, 6, 7, 8, 9, 10, 11, 12, 13, 14, 15, 16, 17, 18, 19, 20, 21, 22, 23, 24, 25, 26, 27, 28, 29, 30, 31, 32, 33, 34, 35, 36, 37, 38, 39, 40, 41, 42, 43, 44, 45, 46, 47, 48, 49, 50, 51, 52, 53, 54, 55, 56, 57, 58, 59, 60, 61, 62, 63, 64, 65, 66, 67, 68, 69, 70, 71, 72, 73, 74, 75, 76, 77, 78, 79, 80, 81, 82, 83, 84, 85, 86, 87, 88, 89, 90, 91, 92, 93, 94, 95, 96, 97, 98, 99, 100, 101, 102, 103, 104, 105, 106, 107, 108, 109, 110, 111, 112, 113, 114, 115, 116, 117, 577, 579, 581, 583, 585, 587, 589, 591, 593, 595, 597, 599, 601, 603, 605, 607, 609, 611, 613, 615, 617, 619, 621, 623, 625, or 627, a variant, derivative, orthologue, paralogue or homologue thereof, in which:

[1082] the amino acid at Mutated site 4 is Ser, and the amino acid at Mutated site 5 is Arg.

[1083] In another preferred embodiment, the mutated PPO comprises a sequence of SEQ ID NO: 1, 2, 3, 4, 5, 6, 7, 8, 9, 10, 11, 12, 13, 14, 15, 16, 17, 18, 19, 20, 21, 22, 23, 24, 25, 26, 27, 28, 29, 30, 31, 32, 33, 34, 35, 36, 37, 38, 39, 40, 41, 42, 43, 44, 45, 46, 47, 48, 49, 50, 51, 52, 53, 54, 55, 56, 57, 58, 59, 60, 61, 62, 63, 64, 65, 66, 67, 68, 69, 70, 71, 72, 73, 74, 75, 76, 77, 78, 79, 80, 81, 82, 83, 84, 85, 86, 87, 88, 89, 90, 91, 92, 93, 94, 95, 96, 97, 98, 99, 100, 101, 102, 103, 104, 105, 106, 107, 108, 109, 110, 111, 112, 113, 114, 115, 116, 117, 577, 579, 581, 583, 585, 587, 589, 591, 593, 595, 597, 599, 601, 603, 605, 607, 609, 611, 613, 615, 617, 619, 621, 623, 625, or 627, a variant, derivative, orthologue, paralogue or homologue thereof, in which:

[1084] the amino acid at Mutated site 4 is Ser, and the amino acid at Mutated site 5 is Tyr.

[1085] In another preferred embodiment, the mutated PPO comprises a sequence of SEQ ID NO: 1, 2, 3, 4, 5, 6, 7, 8, 9, 10, 11, 12, 13, 14, 15, 16, 17, 18, 19, 20, 21, 22, 23, 24, 25, 26, 27, 28, 29, 30, 31, 32, 33, 34, 35, 36, 37, 38, 39, 40, 41, 42, 43, 44, 45, 46, 47, 48, 49, 50, 51, 52, 53, 54, 55, 56, 57, 58, 59, 60, 61, 62, 63, 64, 65, 66, 67, 68, 69, 70, 71, 72, 73, 74, 75, 76, 77, 78, 79, 80, 81, 82, 83, 84, 85, 86, 87, 88, 89, 90, 91, 92, 93, 94, 95, 96, 97, 98, 99, 100, 101, 102, 103, 104, 105, 106, 107, 108, 109, 110, 111, 112, 113, 114, 115, 116, 117, 577, 579, 581, 583, 585, 587, 589, 591, 593, 595, 597, 599, 601, 603, 605, 607, 609, 611, 613, 615, 617, 619, 621, 623, 625, or 627, a variant, derivative, orthologue, paralogue or homologue thereof, in which:

[1086] the amino acid at Mutated site 4 is Ser, and the amino acid at Mutated site 5 is Trp.

[1087] In another preferred embodiment, the mutated PPO comprises a sequence of SEQ ID NO: 1, 2, 3, 4, 5, 6, 7, 8, 9, 10, 11, 12, 13, 14, 15, 16, 17, 18, 19, 20, 21, 22, 23, 24, 25, 26, 27, 28, 29, 30, 31, 32, 33, 34, 35, 36, 37, 38, 39, 40, 41, 42, 43, 44, 45, 46, 47, 48, 49, 50, 51, 52, 53, 54, 55, 56, 57, 58, 59, 60, 61, 62, 63, 64, 65, 66, 67, 68, 69, 70, 71, 72, 73, 74, 75, 76, 77, 78, 79, 80, 81, 82, 83, 84, 85, 86, 87, 88, 89, 90, 91, 92, 93, 94, 95, 96, 97, 98, 99, 100, 101, 102, 103, 104, 105, 106, 107, 108, 109, 110, 111, 112, 113, 114, 115, 116, 117, 577, 579, 581, 583, 585, 587, 589, 591, 593, 595, 597, 599, 601, 603, 605, 607, 609, 611, 613, 615, 617, 619, 621, 623, 625, or 627, a variant, derivative, orthologue, paralogue or homologue thereof, in which:

[1088] the amino acid at Mutated site 4 is Thr, and the amino acid at Mutated site 5 is Ala.

[1089] In another preferred embodiment, the mutated PPO comprises a sequence of SEQ ID NO: 1, 2, 3, 4, 5, 6, 7, 8, 9, 10, 11, 12, 13, 14, 15, 16, 17, 18, 19, 20, 21, 22, 23, 24, 25, 26, 27, 28, 29, 30, 31, 32, 33, 34, 35, 36, 37, 38, 39, 40, 41, 42, 43, 44, 45, 46, 47, 48, 49, 50, 51, 52, 53, 54, 55, 56, 57, 58, 59, 60, 61, 62, 63, 64, 65, 66, 67, 68, 69, 70, 71, 72, 73, 74, 75, 76, 77, 78, 79, 80, 81, 82, 83, 84, 85, 86, 87, 88, 89, 90, 91, 92, 93, 94, 95, 96, 97, 98, 99, 100, 101, 102, 103, 104, 105, 106, 107, 108, 109, 110, 111, 112, 113, 114, 115, 116, 117, 577, 579, 581, 583, 585, 587, 589, 591, 593, 595, 597, 599, 601, 603, 605, 607, 609, 611, 613, 615, 617, 619, 621, 623, 625, or 627, a variant, derivative, orthologue, paralogue or homologue thereof, in which:

[1090] the amino acid at Mutated site 4 is Thr, and the amino acid at Mutated site 5 is Leu.

[1091] In another preferred embodiment, the mutated PPO comprises a sequence of SEQ ID NO: 1, 2, 3, 4, 5, 6, 7, 8, 9, 10, 11, 12, 13, 14, 15, 16, 17, 18, 19, 20, 21, 22, 23, 24, 25, 26, 27, 28, 29, 30, 31, 32, 33, 34, 35, 36, 37, 38, 39, 40, 41, 42, 43, 44, 45, 46, 47, 48, 49, 50, 51, 52, 53, 54, 55, 56, 57, 58, 59, 60, 61, 62, 63, 64, 65, 66, 67, 68, 69, 70, 71, 72, 73, 74, 75, 76, 77, 78, 79, 80, 81, 82, 83, 84, 85, 86, 87, 88, 89, 90, 91, 92, 93, 94, 95, 96, 97, 98, 99, 100, 101, 102, 103, 104, 105, 106, 107, 108, 109, 110, 111, 112, 113, 114, 115, 116, 117, 577, 579, 581, 583, 585, 587, 589, 591, 593, 595, 597, 599, 601, 603, 605, 607, 609, 611, 613, 615, 617, 619, 621, 623, 625, or 627, a variant, derivative, orthologue, paralogue or homologue thereof, in which:

[1092] the amino acid at Mutated site 4 is Thr, and the amino acid at Mutated site 5 is Val.

[1093] In another preferred embodiment, the mutated PPO comprises a sequence of SEQ ID NO: 1, 2, 3, 4, 5, 6, 7, 8, 9, 10, 11, 12, 13, 14, 15, 16, 17, 18, 19, 20, 21, 22, 23, 24, 25, 26, 27, 28, 29, 30, 31, 32, 33, 34, 35, 36, 37, 38, 39, 40, 41, 42, 43, 44, 45, 46, 47, 48, 49, 50, 51, 52, 53, 54, 55, 56, 57, 58, 59, 60, 61, 62, 63, 64, 65, 66, 67, 68, 69, 70, 71, 72, 73, 74, 75, 76, 77, 78, 79, 80, 81, 82, 83, 84, 85, 86, 87, 88, 89, 90, 91, 92, 93, 94, 95, 96, 97, 98, 99, 100, 101, 102, 103, 104, 105, 106, 107, 108, 109, 110, 111, 112, 113, 114, 115, 116, 117, 577, 579, 581, 583, 585, 587, 589, 591, 593, 595, 597, 599, 601, 603, 605, 607, 609, 611, 613, 615, 617, 619, 621, 623, 625, or 627, a variant, derivative, orthologue, paralogue or homologue thereof, in which:

[1094] the amino acid at Mutated site 4 is Thr, and the amino acid at Mutated site 5 is Ile.

[1095] In another preferred embodiment, the mutated PPO comprises a sequence of SEQ ID NO: 1, 2, 3, 4, 5, 6, 7, 8, 9, 10, 11, 12, 13, 14, 15, 16, 17, 18, 19, 20, 21, 22, 23, 24, 25, 26, 27, 28, 29, 30, 31, 32, 33, 34, 35, 36, 37, 38, 39, 40, 41, 42, 43, 44, 45, 46, 47, 48, 49, 50, 51, 52, 53, 54, 55, 56, 57, 58, 59, 60, 61, 62, 63, 64, 65, 66, 67, 68, 69, 70, 71, 72, 73, 74, 75, 76, 77, 78, 79, 80, 81, 82, 83, 84, 85, 86, 87, 88, 89, 90, 91, 92, 93, 94, 95, 96, 97, 98, 99, 100, 101, 102, 103, 104, 105, 106, 107, 108, 109, 110, 111, 112, 113, 114, 115, 116, 117, 577, 579, 581, 583, 585, 587, 589, 591, 593, 595, 597, 599, 601, 603, 605, 607, 609, 611, 613, 615, 617, 619, 621, 623, 625, or 627, a variant, derivative, orthologue, paralogue or homologue thereof, in which:

[1096] the amino acid at Mutated site 4 is Thr, and the amino acid at Mutated site 5 is Met.

[1097] In another preferred embodiment, the mutated PPO comprises a sequence of SEQ ID NO: 1, 2, 3, 4, 5, 6, 7, 8, 9, 10, 11, 12, 13, 14, 15, 16, 17, 18, 19, 20, 21, 22, 23, 24, 25, 26, 27, 28, 29, 30, 31, 32, 33, 34, 35, 36, 37, 38, 39, 40, 41, 42, 43, 44, 45, 46, 47, 48, 49, 50, 51, 52, 53, 54, 55, 56, 57, 58, 59, 60, 61, 62, 63, 64, 65, 66, 67, 68, 69, 70, 71, 72, 73, 74, 75, 76, 77, 78, 79, 80, 81, 82, 83, 84, 85, 86, 87, 88, 89, 90, 91, 92, 93, 94, 95, 96, 97, 98, 99, 100, 101, 102, 103, 104, 105, 106, 107, 108, 109, 110, 111, 112, 113, 114, 115, 116, 117, 577, 579, 581, 583, 585, 587, 589, 591, 593, 595, 597, 599, 601, 603, 605, 607, 609, 611, 613, 615, 617, 619, 621, 623, 625, or 627, a variant, derivative, orthologue, paralogue or homologue thereof, in which:

[1098] the amino acid at Mutated site 4 is Thr, and the amino acid at Mutated site 5 is His.

[1099] In another preferred embodiment, the mutated PPO comprises a sequence of SEQ ID NO: 1, 2, 3, 4, 5, 6, 7, 8, 9, 10, 11, 12, 13, 14, 15, 16, 17, 18, 19, 20, 21, 22, 23, 24, 25, 26, 27, 28, 29, 30, 31, 32, 33, 34, 35, 36, 37, 38, 39, 40, 41, 42, 43, 44, 45, 46, 47, 48, 49, 50, 51, 52, 53, 54, 55, 56, 57, 58, 59, 60, 61, 62, 63, 64, 65, 66, 67, 68, 69, 70, 71, 72, 73, 74, 75, 76, 77, 78, 79, 80, 81, 82, 83, 84, 85, 86, 87, 88, 89, 90, 91, 92, 93, 94, 95, 96, 97, 98, 99, 100, 101, 102, 103, 104, 105, 106, 107, 108, 109, 110, 111, 112, 113, 114, 115, 116, 117, 577, 579, 581, 583, 585, 587, 589, 591, 593, 595, 597, 599, 601, 603, 605, 607, 609, 611, 613, 615, 617, 619, 621, 623, 625, or 627, a variant, derivative, orthologue, paralogue or homologue thereof, in which:

[1100] the amino acid at Mutated site 4 is Thr, and the amino acid at Mutated site 5 is Lys.

[1101] In another preferred embodiment, the mutated PPO comprises a sequence of SEQ ID NO: 1, 2, 3, 4, 5, 6, 7, 8, 9, 10, 11, 12, 13, 14, 15, 16, 17, 18, 19, 20, 21, 22, 23, 24, 25, 26, 27, 28, 29, 30, 31, 32, 33, 34, 35, 36, 37, 38, 39, 40, 41, 42, 43, 44, 45, 46, 47, 48, 49, 50, 51, 52, 53, 54, 55, 56, 57, 58, 59, 60, 61, 62, 63, 64, 65, 66, 67, 68, 69, 70, 71, 72, 73, 74, 75, 76, 77, 78, 79, 80, 81, 82, 83, 84, 85, 86, 87, 88, 89, 90, 91, 92, 93, 94, 95, 96, 97, 98, 99, 100, 101, 102, 103, 104, 105, 106, 107, 108, 109, 110, 111, 112, 113, 114, 115, 116, 117, 577, 579, 581, 583, 585, 587, 589, 591, 593, 595, 597, 599, 601, 603, 605, 607, 609, 611, 613, 615, 617, 619, 621, 623, 625, or 627, a variant, derivative, orthologue, paralogue or homologue thereof, in which:

[1102] the amino acid at Mutated site 4 is Thr, and the amino acid at Mutated site 5 is Asp.

[1103] In another preferred embodiment, the mutated PPO comprises a sequence of SEQ ID NO: 1, 2, 3, 4, 5, 6, 7, 8, 9, 10, 11, 12, 13, 14, 15, 16, 17, 18, 19, 20, 21, 22, 23, 24, 25, 26, 27, 28, 29, 30, 31, 32, 33, 34, 35, 36, 37, 38, 39, 40, 41, 42, 43, 44, 45, 46, 47, 48, 49, 50, 51, 52, 53, 54, 55, 56, 57, 58, 59, 60, 61, 62, 63, 64, 65, 66, 67, 68, 69, 70, 71, 72, 73, 74, 75, 76, 77, 78, 79, 80, 81, 82, 83, 84, 85, 86, 87, 88, 89, 90, 91, 92, 93, 94, 95, 96, 97, 98, 99, 100, 101, 102, 103, 104, 105, 106, 107, 108, 109, 110, 111, 112, 113, 114, 115, 116, 117, 577, 579, 581, 583, 585, 587, 589, 591, 593, 595, 597, 599, 601, 603, 605, 607, 609, 611, 613, 615, 617, 619, 621, 623, 625, or 627, a variant, derivative, orthologue, paralogue or homologue thereof, in which:

[1104] the amino acid at Mutated site 4 is Thr, and the amino acid at Mutated site 5 is Glu.

[1105] In another preferred embodiment, the mutated PPO comprises a sequence of SEQ ID NO: 1, 2, 3, 4, 5, 6, 7, 8, 9, 10, 11, 12, 13, 14, 15, 16, 17, 18, 19, 20, 21, 22, 23, 24, 25, 26, 27, 28, 29, 30, 31, 32, 33, 34, 35, 36, 37, 38, 39, 40, 41, 42, 43, 44, 45, 46, 47, 48, 49, 50, 51, 52, 53, 54, 55, 56, 57, 58, 59, 60, 61, 62, 63, 64, 65, 66, 67, 68, 69, 70, 71, 72, 73, 74, 75, 76, 77, 78, 79, 80, 81, 82, 83, 84, 85, 86, 87, 88, 89, 90, 91, 92, 93, 94, 95, 96, 97, 98, 99, 100, 101, 102, 103, 104, 105, 106, 107, 108, 109, 110, 111, 112, 113, 114, 115, 116, 117, 577, 579, 581, 583, 585, 587, 589, 591, 593, 595, 597, 599, 601, 603, 605, 607, 609, 611, 613, 615, 617, 619, 621, 623, 625, or 627, a variant, derivative, orthologue, paralogue or homologue thereof, in which:

[1106] the amino acid at Mutated site 4 is Thr, and the amino acid at Mutated site 5 is Ser.

[1107] In another preferred embodiment, the mutated PPO comprises a sequence of SEQ ID NO: 1, 2, 3, 4, 5, 6, 7, 8, 9, 10, 11, 12, 13, 14, 15, 16, 17, 18, 19, 20, 21, 22, 23, 24, 25, 26, 27, 28, 29, 30, 31, 32, 33, 34, 35, 36, 37, 38, 39, 40, 41, 42, 43, 44, 45, 46, 47, 48, 49, 50, 51, 52, 53, 54, 55, 56, 57, 58, 59, 60, 61, 62, 63, 64, 65, 66, 67, 68, 69, 70, 71, 72, 73, 74, 75, 76, 77, 78, 79, 80, 81, 82, 83, 84, 85, 86, 87, 88, 89, 90, 91, 92, 93, 94, 95, 96, 97, 98, 99, 100, 101, 102, 103, 104, 105, 106, 107, 108, 109, 110, 111, 112, 113, 114, 115, 116, 117, 577, 579, 581, 583, 585, 587, 589, 591, 593, 595, 597, 599, 601, 603, 605, 607, 609, 611, 613, 615, 617, 619, 621, 623, 625, or 627, a variant, derivative, orthologue, paralogue or homologue thereof, in which:

[1108] the amino acid at Mutated site 4 is Thr, and the amino acid at Mutated site 5 is Thr.

[1109] In another preferred embodiment, the mutated PPO comprises a sequence of SEQ ID NO: 1, 2, 3, 4, 5, 6, 7, 8, 9, 10, 11, 12, 13, 14, 15, 16, 17, 18, 19, 20, 21, 22, 23, 24, 25, 26, 27, 28, 29, 30, 31, 32, 33, 34, 35, 36, 37, 38, 39, 40, 41, 42, 43, 44, 45, 46, 47, 48, 49, 50, 51, 52, 53, 54, 55, 56, 57, 58, 59, 60, 61, 62, 63, 64, 65, 66, 67, 68, 69, 70, 71, 72, 73, 74, 75, 76, 77, 78, 79, 80, 81, 82, 83, 84, 85, 86, 87, 88, 89, 90, 91, 92, 93, 94, 95, 96, 97, 98, 99, 100, 101, 102, 103, 104, 105, 106, 107, 108, 109, 110, 111, 112, 113, 114, 115, 116, 117, 577, 579, 581, 583, 585, 587, 589, 591, 593, 595, 597, 599, 601, 603, 605, 607, 609, 611, 613, 615, 617, 619, 621, 623, 625, or 627, a variant, derivative, orthologue, paralogue or homologue thereof, in which:

[1110] the amino acid at Mutated site 4 is Thr, and the amino acid at Mutated site 5 is Asn.

[1111] In another preferred embodiment, the mutated PPO comprises a sequence of SEQ ID NO: 1, 2, 3, 4, 5, 6, 7, 8, 9, 10, 11, 12, 13, 14, 15, 16, 17, 18, 19, 20, 21, 22, 23, 24, 25, 26, 27, 28, 29, 30, 31, 32, 33, 34, 35, 36, 37, 38, 39, 40, 41, 42, 43, 44, 45, 46, 47, 48, 49, 50, 51, 52, 53, 54, 55, 56, 57, 58, 59, 60, 61, 62, 63, 64, 65, 66, 67, 68, 69, 70, 71, 72, 73, 74, 75, 76, 77, 78, 79, 80, 81, 82, 83, 84, 85, 86, 87, 88, 89, 90, 91, 92, 93, 94, 95, 96, 97, 98, 99, 100, 101, 102, 103, 104, 105, 106, 107, 108, 109, 110, 111, 112, 113, 114, 115, 116, 117, 577, 579, 581, 583, 585, 587, 589, 591, 593, 595, 597, 599, 601, 603, 605, 607, 609, 611, 613, 615, 617, 619, 621, 623, 625, or 627, a variant, derivative, orthologue, paralogue or homologue thereof, in which:

[1112] the amino acid at Mutated site 4 is Thr, and the amino acid at Mutated site 5 is Gln.

[1113] In another preferred embodiment, the mutated PPO comprises a sequence of SEQ ID NO: 1, 2, 3, 4, 5, 6, 7, 8, 9, 10, 11, 12, 13, 14, 15, 16, 17, 18, 19, 20, 21, 22, 23, 24, 25, 26, 27, 28, 29, 30, 31, 32, 33, 34, 35, 36, 37, 38, 39, 40, 41, 42, 43, 44, 45, 46, 47, 48, 49, 50, 51, 52, 53, 54, 55, 56, 57, 58, 59, 60, 61, 62, 63, 64, 65, 66, 67, 68, 69, 70, 71, 72, 73, 74, 75, 76, 77, 78, 79, 80, 81, 82, 83, 84, 85, 86, 87, 88, 89, 90, 91, 92, 93, 94, 95, 96, 97, 98, 99, 100, 101, 102, 103, 104, 105, 106, 107, 108, 109, 110, 111, 112, 113, 114, 115, 116, 117, 577, 579, 581, 583, 585, 587, 589, 591, 593, 595, 597, 599, 601, 603, 605, 607, 609, 611, 613, 615, 617, 619, 621, 623, 625, or 627, a variant, derivative, orthologue, paralogue or homologue thereof, in which:

[1114] the amino acid at Mutated site 4 is Thr, and the amino acid at Mutated site 5 is Cys.

[1115] In another preferred embodiment, the mutated PPO comprises a sequence of SEQ ID NO: 1, 2, 3, 4, 5, 6, 7, 8, 9, 10, 11, 12, 13, 14, 15, 16, 17, 18, 19, 20, 21, 22, 23, 24, 25, 26, 27, 28, 29, 30, 31, 32, 33, 34, 35, 36, 37, 38, 39, 40, 41, 42, 43, 44, 45, 46, 47, 48, 49, 50, 51, 52, 53, 54, 55, 56, 57, 58, 59, 60, 61, 62, 63, 64, 65, 66, 67, 68, 69, 70, 71, 72, 73, 74, 75, 76, 77, 78, 79, 80, 81, 82, 83, 84, 85, 86, 87, 88, 89, 90, 91, 92, 93, 94, 95, 96, 97, 98, 99, 100, 101, 102, 103, 104, 105, 106, 107, 108, 109, 110, 111, 112, 113, 114, 115, 116, 117, 577, 579, 581, 583, 585, 587, 589, 591, 593, 595, 597, 599, 601, 603, 605, 607, 609, 611, 613, 615, 617, 619, 621, 623, 625, or 627, a variant, derivative, orthologue, paralogue or homologue thereof, in which:

[1116] the amino acid at Mutated site 4 is Thr, and the amino acid at Mutated site 5 is Gly.

[1117] In another preferred embodiment, the mutated PPO comprises a sequence of SEQ ID NO: 1, 2, 3, 4, 5, 6, 7, 8, 9, 10, 11, 12, 13, 14, 15, 16, 17, 18, 19, 20, 21, 22, 23, 24, 25, 26, 27, 28, 29, 30, 31, 32, 33, 34, 35, 36, 37, 38, 39, 40, 41, 42, 43, 44, 45, 46, 47, 48, 49, 50, 51, 52, 53, 54, 55, 56, 57, 58, 59, 60, 61, 62, 63, 64, 65, 66, 67, 68, 69, 70, 71, 72, 73, 74, 75, 76, 77, 78, 79, 80, 81, 82, 83, 84, 85, 86, 87, 88, 89, 90, 91, 92, 93, 94, 95, 96, 97, 98, 99, 100, 101, 102, 103, 104, 105, 106, 107, 108, 109, 110, 111, 112, 113, 114, 115, 116, 117, 577, 579, 581, 583, 585, 587, 589, 591, 593, 595, 597, 599, 601, 603, 605, 607, 609, 611, 613, 615, 617, 619, 621, 623, 625, or 627, a variant, derivative, orthologue, paralogue or homologue thereof, in which:

[1118] the amino acid at Mutated site 4 is Thr, and the amino acid at Mutated site 5 is Pro.

[1119] In another preferred embodiment, the mutated PPO comprises a sequence of SEQ ID NO: 1, 2, 3, 4, 5, 6, 7, 8, 9, 10, 11, 12, 13, 14, 15, 16, 17, 18, 19, 20, 21, 22, 23, 24, 25, 26, 27, 28, 29, 30, 31, 32, 33, 34, 35, 36, 37, 38, 39, 40, 41, 42, 43, 44, 45, 46, 47, 48, 49, 50, 51, 52, 53, 54, 55, 56, 57, 58, 59, 60, 61, 62, 63, 64, 65, 66, 67, 68, 69, 70, 71, 72, 73, 74, 75, 76, 77, 78, 79, 80, 81, 82, 83, 84, 85, 86, 87, 88, 89, 90, 91, 92, 93, 94, 95, 96, 97, 98, 99, 100, 101, 102, 103, 104, 105, 106, 107, 108, 109, 110, 111, 112, 113, 114, 115, 116, 117, 577, 579, 581, 583, 585, 587, 589, 591, 593, 595, 597, 599, 601, 603, 605, 607, 609, 611, 613, 615, 617, 619, 621, 623, 625, or 627, a variant, derivative, orthologue, paralogue or homologue thereof, in which:

[1120] the amino acid at Mutated site 4 is Thr, and the amino acid at Mutated site 5 is Arg.

[1121] In another preferred embodiment, the mutated PPO comprises a sequence of SEQ ID NO: 1, 2, 3, 4, 5, 6, 7, 8, 9, 10, 11, 12, 13, 14, 15, 16, 17, 18, 19, 20, 21, 22, 23, 24, 25, 26, 27, 28, 29, 30, 31, 32, 33, 34, 35, 36, 37, 38, 39, 40, 41, 42, 43, 44, 45, 46, 47, 48, 49, 50, 51, 52, 53, 54, 55, 56, 57, 58, 59, 60, 61, 62, 63, 64, 65, 66, 67, 68, 69, 70, 71, 72, 73, 74, 75, 76, 77, 78, 79, 80, 81, 82, 83, 84, 85, 86, 87, 88, 89, 90, 91, 92, 93, 94, 95, 96, 97, 98, 99, 100, 101, 102, 103, 104, 105, 106, 107, 108, 109, 110, 111, 112, 113, 114, 115, 116, 117, 577, 579, 581, 583, 585, 587, 589, 591, 593, 595, 597, 599, 601, 603, 605, 607, 609, 611, 613, 615, 617, 619, 621, 623, 625, or 627, a variant, derivative, orthologue, paralogue or homologue thereof, in which:

[1122] the amino acid at Mutated site 4 is Thr, and the amino acid at Mutated site 5 is Tyr.

[1123] In another preferred embodiment, the mutated PPO comprises a sequence of SEQ ID NO: 1, 2, 3, 4, 5, 6, 7, 8, 9, 10, 11, 12, 13, 14, 15, 16, 17, 18, 19, 20, 21, 22, 23, 24, 25, 26, 27, 28, 29, 30, 31, 32, 33, 34, 35, 36, 37, 38, 39, 40, 41, 42, 43, 44, 45, 46, 47, 48, 49, 50, 51, 52, 53, 54, 55, 56, 57, 58, 59, 60, 61, 62, 63, 64, 65, 66, 67, 68, 69, 70, 71, 72, 73, 74, 75, 76, 77, 78, 79, 80, 81, 82, 83, 84, 85, 86, 87, 88, 89, 90, 91, 92, 93, 94, 95, 96, 97, 98, 99, 100, 101, 102, 103, 104, 105, 106, 107, 108, 109, 110, 111, 112, 113, 114, 115, 116, 117, 577, 579, 581, 583, 585, 587, 589, 591, 593, 595, 597, 599, 601, 603, 605, 607, 609, 611, 613, 615, 617, 619, 621, 623, 625, or 627, a variant, derivative, orthologue, paralogue or homologue thereof, in which:

[1124] the amino acid at Mutated site 4 is Thr, and the amino acid at Mutated site 5 is Trp.

[1125] In another preferred embodiment, the mutated PPO comprises a sequence of SEQ ID NO: 1, 2, 3, 4, 5, 6, 7, 8, 9, 10, 11, 12, 13, 14, 15, 16, 17, 18, 19, 20, 21, 22, 23, 24, 25, 26, 27, 28, 29, 30, 31, 32, 33, 34, 35, 36, 37, 38, 39, 40, 41, 42, 43, 44, 45, 46, 47, 48, 49, 50, 51, 52, 53, 54, 55, 56, 57, 58, 59, 60, 61, 62, 63, 64, 65, 66, 67, 68, 69, 70, 71, 72, 73, 74, 75, 76, 77, 78, 79, 80, 81, 82, 83, 84, 85, 86, 87, 88, 89, 90, 91, 92, 93, 94, 95, 96, 97, 98, 99, 100, 101, 102, 103, 104, 105, 106, 107, 108, 109, 110, 111, 112, 113, 114, 115, 116, 117, 577, 579, 581, 583, 585, 587, 589, 591, 593, 595, 597, 599, 601, 603, 605, 607, 609, 611, 613, 615, 617, 619, 621, 623, 625, or 627, a variant, derivative, orthologue, paralogue or homologue thereof, in which:

[1126] the amino acid at Mutated site 4 is Asn, and the amino acid at Mutated site 5 is Ala.

[1127] In another preferred embodiment, the mutated PPO comprises a sequence of SEQ ID NO: 1, 2, 3, 4, 5, 6, 7, 8, 9, 10, 11, 12, 13, 14, 15, 16, 17, 18, 19, 20, 21, 22, 23, 24, 25, 26, 27, 28, 29, 30, 31, 32, 33, 34, 35, 36, 37, 38, 39, 40, 41, 42, 43, 44, 45, 46, 47, 48, 49, 50, 51, 52, 53, 54, 55, 56, 57, 58, 59, 60, 61, 62, 63, 64, 65, 66, 67, 68, 69, 70, 71, 72, 73, 74, 75, 76, 77, 78, 79, 80, 81, 82, 83, 84, 85, 86, 87, 88, 89, 90, 91, 92, 93, 94, 95, 96, 97, 98, 99, 100, 101, 102, 103, 104, 105, 106, 107, 108, 109, 110, 111, 112, 113, 114, 115, 116, 117, 577, 579, 581, 583, 585, 587, 589, 591, 593, 595, 597, 599, 601, 603, 605, 607, 609, 611, 613, 615, 617, 619, 621, 623, 625, or 627, a variant, derivative, orthologue, paralogue or homologue thereof, in which:

[1128] the amino acid at Mutated site 4 is Asn, and the amino acid at Mutated site 5 is Leu.

[1129] In another preferred embodiment, the mutated PPO comprises a sequence of SEQ ID NO: 1, 2, 3, 4, 5, 6, 7, 8, 9, 10, 11, 12, 13, 14, 15, 16, 17, 18, 19, 20, 21, 22, 23, 24, 25, 26, 27, 28, 29, 30, 31, 32, 33, 34, 35, 36, 37, 38, 39, 40, 41, 42, 43, 44, 45, 46, 47, 48, 49, 50, 51, 52, 53, 54, 55, 56, 57, 58, 59, 60, 61, 62, 63, 64, 65, 66, 67, 68, 69, 70, 71, 72, 73, 74, 75, 76, 77, 78, 79, 80, 81, 82, 83, 84, 85, 86, 87, 88, 89, 90, 91, 92, 93, 94, 95, 96, 97, 98, 99, 100, 101, 102, 103, 104, 105, 106, 107, 108, 109, 110, 111, 112, 113, 114, 115, 116, 117, 577, 579, 581, 583, 585, 587, 589, 591, 593, 595, 597, 599, 601, 603, 605, 607, 609, 611, 613, 615, 617, 619, 621, 623, 625, or 627, a variant, derivative, orthologue, paralogue or homologue thereof, in which:

[1130] the amino acid at Mutated site 4 is Asn, and the amino acid at Mutated site 5 is Val.

[1131] In another preferred embodiment, the mutated PPO comprises a sequence of SEQ ID NO: 1, 2, 3, 4, 5, 6, 7, 8, 9, 10, 11, 12, 13, 14, 15, 16, 17, 18, 19, 20, 21, 22, 23, 24, 25, 26, 27, 28, 29, 30, 31, 32, 33, 34, 35, 36, 37, 38, 39, 40, 41, 42, 43, 44, 45, 46, 47, 48, 49, 50, 51, 52, 53, 54, 55, 56, 57, 58, 59, 60, 61, 62, 63, 64, 65, 66, 67, 68, 69, 70, 71, 72, 73, 74, 75, 76, 77, 78, 79, 80, 81, 82, 83, 84, 85, 86, 87, 88, 89, 90, 91, 92, 93, 94, 95, 96, 97, 98, 99, 100, 101, 102, 103, 104, 105, 106, 107, 108, 109, 110, 111, 112, 113, 114, 115, 116, 117, 577, 579, 581, 583, 585, 587, 589, 591, 593, 595, 597, 599, 601, 603, 605, 607, 609, 611, 613, 615, 617, 619, 621, 623, 625, or 627, a variant, derivative, orthologue, paralogue or homologue thereof, in which:

[1132] the amino acid at Mutated site 4 is Asn, and the amino acid at Mutated site 5 is Ile.

[1133] In another preferred embodiment, the mutated PPO comprises a sequence of SEQ ID NO: 1, 2, 3, 4, 5, 6, 7, 8, 9, 10, 11, 12, 13, 14, 15, 16, 17, 18, 19, 20, 21, 22, 23, 24, 25, 26, 27, 28, 29, 30, 31, 32, 33, 34, 35, 36, 37, 38, 39, 40, 41, 42, 43, 44, 45, 46, 47, 48, 49, 50, 51, 52, 53, 54, 55, 56, 57, 58, 59, 60, 61, 62, 63, 64, 65, 66, 67, 68, 69, 70, 71, 72, 73, 74, 75, 76, 77, 78, 79, 80, 81, 82, 83, 84, 85, 86, 87, 88, 89, 90, 91, 92, 93, 94, 95, 96, 97, 98, 99, 100, 101, 102, 103, 104, 105, 106, 107, 108, 109, 110, 111, 112, 113, 114, 115, 116, 117, 577, 579, 581, 583, 585, 587, 589, 591, 593, 595, 597, 599, 601, 603, 605, 607, 609, 611, 613, 615, 617, 619, 621, 623, 625, or 627, a variant, derivative, orthologue, paralogue or homologue thereof, in which:

[1134] the amino acid at Mutated site 4 is Asn, and the amino acid at Mutated site 5 is Met.

[1135] In another preferred embodiment, the mutated PPO comprises a sequence of SEQ ID NO: 1, 2, 3, 4, 5, 6, 7, 8, 9, 10, 11, 12, 13, 14, 15, 16, 17, 18, 19, 20, 21, 22, 23, 24, 25, 26, 27, 28, 29, 30, 31, 32, 33, 34, 35, 36, 37, 38, 39, 40, 41, 42, 43, 44, 45, 46, 47, 48, 49, 50, 51, 52, 53, 54, 55, 56, 57, 58, 59, 60, 61, 62, 63, 64, 65, 66, 67, 68, 69, 70, 71, 72, 73, 74, 75, 76, 77, 78, 79, 80, 81, 82, 83, 84, 85, 86, 87, 88, 89, 90, 91, 92, 93, 94, 95, 96, 97, 98, 99, 100, 101, 102, 103, 104, 105, 106, 107, 108, 109, 110, 111, 112, 113, 114, 115, 116, 117, 577, 579, 581, 583, 585, 587, 589, 591, 593, 595, 597, 599, 601, 603, 605, 607, 609, 611, 613, 615, 617, 619, 621, 623, 625, or 627, a variant, derivative, orthologue, paralogue or homologue thereof, in which:

[1136] the amino acid at Mutated site 4 is Asn, and the amino acid at Mutated site 5 is His.

[1137] In another preferred embodiment, the mutated PPO comprises a sequence of SEQ ID NO: 1, 2, 3, 4, 5, 6, 7, 8, 9, 10, 11, 12, 13, 14, 15, 16, 17, 18, 19, 20, 21, 22, 23, 24, 25, 26, 27, 28, 29, 30, 31, 32, 33, 34, 35, 36, 37, 38, 39, 40, 41, 42, 43, 44, 45, 46, 47, 48, 49, 50, 51, 52, 53, 54, 55, 56, 57, 58, 59, 60, 61, 62, 63, 64, 65, 66, 67, 68, 69, 70, 71, 72, 73, 74, 75, 76, 77, 78, 79, 80, 81, 82, 83, 84, 85, 86, 87, 88, 89, 90, 91, 92, 93, 94, 95, 96, 97, 98, 99, 100, 101, 102, 103, 104, 105, 106, 107, 108, 109, 110, 111, 112, 113, 114, 115, 116, 117, 577, 579, 581, 583, 585, 587, 589, 591, 593, 595, 597, 599, 601, 603, 605, 607, 609, 611, 613, 615, 617, 619, 621, 623, 625, or 627, a variant, derivative, orthologue, paralogue or homologue thereof, in which:

[1138] the amino acid at Mutated site 4 is Asn, and the amino acid at Mutated site 5 is Lys.

[1139] In another preferred embodiment, the mutated PPO comprises a sequence of SEQ ID NO: 1, 2, 3, 4, 5, 6, 7, 8, 9, 10, 11, 12, 13, 14, 15, 16, 17, 18, 19, 20, 21, 22, 23, 24, 25, 26, 27, 28, 29, 30, 31, 32, 33, 34, 35, 36, 37, 38, 39, 40, 41, 42, 43, 44, 45, 46, 47, 48, 49, 50, 51, 52, 53, 54, 55, 56, 57, 58, 59, 60, 61, 62, 63, 64, 65, 66, 67, 68, 69, 70, 71, 72, 73, 74, 75, 76, 77, 78, 79, 80, 81, 82, 83, 84, 85, 86, 87, 88, 89, 90, 91, 92, 93, 94, 95, 96, 97, 98, 99, 100, 101, 102, 103, 104, 105, 106, 107, 108, 109, 110, 111, 112, 113, 114, 115, 116, 117, 577, 579, 581, 583, 585, 587, 589, 591, 593, 595, 597, 599, 601, 603, 605, 607, 609, 611, 613, 615, 617, 619, 621, 623, 625, or 627, a variant, derivative, orthologue, paralogue or homologue thereof, in which:

[1140] the amino acid at Mutated site 4 is Asn, and the amino acid at Mutated site 5 is Asp.

[1141] In another preferred embodiment, the mutated PPO comprises a sequence of SEQ ID NO: 1, 2, 3, 4, 5, 6, 7, 8, 9, 10, 11, 12, 13, 14, 15, 16, 17, 18, 19, 20, 21, 22, 23, 24, 25, 26, 27, 28, 29, 30, 31, 32, 33, 34, 35, 36, 37, 38, 39, 40, 41, 42, 43, 44, 45, 46, 47, 48, 49, 50, 51, 52, 53, 54, 55, 56, 57, 58, 59, 60, 61, 62, 63, 64, 65, 66, 67, 68, 69, 70, 71, 72, 73, 74, 75, 76, 77, 78, 79, 80, 81, 82, 83, 84, 85, 86, 87, 88, 89, 90, 91, 92, 93, 94, 95, 96, 97, 98, 99, 100, 101, 102, 103, 104, 105, 106, 107, 108, 109, 110, 111, 112, 113, 114, 115, 116, 117, 577, 579, 581, 583, 585, 587, 589, 591, 593, 595, 597, 599, 601, 603, 605, 607, 609, 611, 613, 615, 617, 619, 621, 623, 625, or 627, a variant, derivative, orthologue, paralogue or homologue thereof, in which:

[1142] the amino acid at Mutated site 4 is Asn, and the amino acid at Mutated site 5 is Glu.

[1143] In another preferred embodiment, the mutated PPO comprises a sequence of SEQ ID NO: 1, 2, 3, 4, 5, 6, 7, 8, 9, 10, 11, 12, 13, 14, 15, 16, 17, 18, 19, 20, 21, 22, 23, 24, 25, 26, 27, 28, 29, 30, 31, 32, 33, 34, 35, 36, 37, 38, 39, 40, 41, 42, 43, 44, 45, 46, 47, 48, 49, 50, 51, 52, 53, 54, 55, 56, 57, 58, 59, 60, 61, 62, 63, 64, 65, 66, 67, 68, 69, 70, 71, 72, 73, 74, 75, 76, 77, 78, 79, 80, 81, 82, 83, 84, 85, 86, 87, 88, 89, 90, 91, 92, 93, 94, 95, 96, 97, 98, 99, 100, 101, 102, 103, 104, 105, 106, 107, 108, 109, 110, 111, 112, 113, 114, 115, 116, 117, 577, 579, 581, 583, 585, 587, 589, 591, 593, 595, 597, 599, 601, 603, 605, 607, 609, 611, 613, 615, 617, 619, 621, 623, 625, or 627, a variant, derivative, orthologue, paralogue or homologue thereof, in which:

[1144] the amino acid at Mutated site 4 is Asn, and the amino acid at Mutated site 5 is Ser.

[1145] In another preferred embodiment, the mutated PPO comprises a sequence of SEQ ID NO: 1, 2, 3, 4, 5, 6, 7, 8, 9, 10, 11, 12, 13, 14, 15, 16, 17, 18, 19, 20, 21, 22, 23, 24, 25, 26, 27, 28, 29, 30, 31, 32, 33, 34, 35, 36, 37, 38, 39, 40, 41, 42, 43, 44, 45, 46, 47, 48, 49, 50, 51, 52, 53, 54, 55, 56, 57, 58, 59, 60, 61, 62, 63, 64, 65, 66, 67, 68, 69, 70, 71, 72, 73, 74, 75, 76, 77, 78, 79, 80, 81, 82, 83, 84, 85, 86, 87, 88, 89, 90, 91, 92, 93, 94, 95, 96, 97, 98, 99, 100, 101, 102, 103, 104, 105, 106, 107, 108, 109, 110, 111, 112, 113, 114, 115, 116, 117, 577, 579, 581, 583, 585, 587, 589, 591, 593, 595, 597, 599, 601, 603, 605, 607, 609, 611, 613, 615, 617, 619, 621, 623, 625, or 627, a variant, derivative, orthologue, paralogue or homologue thereof, in which:

[1146] the amino acid at Mutated site 4 is Asn, and the amino acid at Mutated site 5 is Thr.

[1147] In another preferred embodiment, the mutated PPO comprises a sequence of SEQ ID NO: 1, 2, 3, 4, 5, 6, 7, 8, 9, 10, 11, 12, 13, 14, 15, 16, 17, 18, 19, 20, 21, 22, 23, 24, 25, 26, 27, 28, 29, 30, 31, 32, 33, 34, 35, 36, 37, 38, 39, 40, 41, 42, 43, 44, 45, 46, 47, 48, 49, 50, 51, 52, 53, 54, 55, 56, 57, 58, 59, 60, 61, 62, 63, 64, 65, 66, 67, 68, 69, 70, 71, 72, 73, 74, 75, 76, 77, 78, 79, 80, 81, 82, 83, 84, 85, 86, 87, 88, 89, 90, 91, 92, 93, 94, 95, 96, 97, 98, 99, 100, 101, 102, 103, 104, 105, 106, 107, 108, 109, 110, 111, 112, 113, 114, 115, 116, 117, 577, 579, 581, 583, 585, 587, 589, 591, 593, 595, 597, 599, 601, 603, 605, 607, 609, 611, 613, 615, 617, 619, 621, 623, 625, or 627, a variant, derivative, orthologue, paralogue or homologue thereof, in which:

[1148] the amino acid at Mutated site 4 is Asn, and the amino acid at Mutated site 5 is Asn.

[1149] In another preferred embodiment, the mutated PPO comprises a sequence of SEQ ID NO: 1, 2, 3, 4, 5, 6, 7, 8, 9, 10, 11, 12, 13, 14, 15, 16, 17, 18, 19, 20, 21, 22, 23, 24, 25, 26, 27, 28, 29, 30, 31, 32, 33, 34, 35, 36, 37, 38, 39, 40, 41, 42, 43, 44, 45, 46, 47, 48, 49, 50, 51, 52, 53, 54, 55, 56, 57, 58, 59, 60, 61, 62, 63, 64, 65, 66, 67, 68, 69, 70, 71, 72, 73, 74, 75, 76, 77, 78, 79, 80, 81, 82, 83, 84, 85, 86, 87, 88, 89, 90, 91, 92, 93, 94, 95, 96, 97, 98, 99, 100, 101, 102, 103, 104, 105, 106, 107, 108, 109, 110, 111, 112, 113, 114, 115, 116, 117, 577, 579, 581, 583, 585, 587, 589, 591, 593, 595, 597, 599, 601, 603, 605, 607, 609, 611, 613, 615, 617, 619, 621, 623, 625, or 627, a variant, derivative, orthologue, paralogue or homologue thereof, in which:

[1150] the amino acid at Mutated site 4 is Asn, and the amino acid at Mutated site 5 is Gln.

[1151] In another preferred embodiment, the mutated PPO comprises a sequence of SEQ ID NO: 1, 2, 3, 4, 5, 6, 7, 8, 9, 10, 11, 12, 13, 14, 15, 16, 17, 18, 19, 20, 21, 22, 23, 24, 25, 26, 27, 28, 29, 30, 31, 32, 33, 34, 35, 36, 37, 38, 39, 40, 41, 42, 43, 44, 45, 46, 47, 48, 49, 50, 51, 52, 53, 54, 55, 56, 57, 58, 59, 60, 61, 62, 63, 64, 65, 66, 67, 68, 69, 70, 71, 72, 73, 74, 75, 76, 77, 78, 79, 80, 81, 82, 83, 84, 85, 86, 87, 88, 89, 90, 91, 92, 93, 94, 95, 96, 97, 98, 99, 100, 101, 102, 103, 104, 105, 106, 107, 108, 109, 110, 111, 112, 113, 114, 115, 116, 117, 577, 579, 581, 583, 585, 587, 589, 591, 593, 595, 597, 599, 601, 603, 605, 607, 609, 611, 613, 615, 617, 619, 621, 623, 625, or 627, a variant, derivative, orthologue, paralogue or homologue thereof, in which:

[1152] the amino acid at Mutated site 4 is Asn, and the amino acid at Mutated site 5 is Cys.

[1153] In another preferred embodiment, the mutated PPO comprises a sequence of SEQ ID NO: 1, 2, 3, 4, 5, 6, 7, 8, 9, 10, 11, 12, 13, 14, 15, 16, 17, 18, 19, 20, 21, 22, 23, 24, 25, 26, 27, 28, 29, 30, 31, 32, 33, 34, 35, 36, 37, 38, 39, 40, 41, 42, 43, 44, 45, 46, 47, 48, 49, 50, 51, 52, 53, 54, 55, 56, 57, 58, 59, 60, 61, 62, 63, 64, 65, 66, 67, 68, 69, 70, 71, 72, 73, 74, 75, 76, 77, 78, 79, 80, 81, 82, 83, 84, 85, 86, 87, 88, 89, 90, 91, 92, 93, 94, 95, 96, 97, 98, 99, 100, 101, 102, 103, 104, 105, 106, 107, 108, 109, 110, 111, 112, 113, 114, 115, 116, 117, 577, 579, 581, 583, 585, 587, 589, 591, 593, 595, 597, 599, 601, 603, 605, 607, 609, 611, 613, 615, 617, 619, 621, 623, 625, or 627, a variant, derivative, orthologue, paralogue or homologue thereof, in which:

[1154] the amino acid at Mutated site 4 is Asn, and the amino acid at Mutated site 5 is Gly.

[1155] In another preferred embodiment, the mutated PPO comprises a sequence of SEQ ID NO: 1, 2, 3, 4, 5, 6, 7, 8, 9, 10, 11, 12, 13, 14, 15, 16, 17, 18, 19, 20, 21, 22, 23, 24, 25, 26, 27, 28, 29, 30, 31, 32, 33, 34, 35, 36, 37, 38, 39, 40, 41, 42, 43, 44, 45, 46, 47, 48, 49, 50, 51, 52, 53, 54, 55, 56, 57, 58, 59, 60, 61, 62, 63, 64, 65, 66, 67, 68, 69, 70, 71, 72, 73, 74, 75, 76, 77, 78, 79, 80, 81, 82, 83, 84, 85, 86, 87, 88, 89, 90, 91, 92, 93, 94, 95, 96, 97, 98, 99, 100, 101, 102, 103, 104, 105, 106, 107, 108, 109, 110, 111, 112, 113, 114, 115, 116, 117, 577, 579, 581, 583, 585, 587, 589, 591, 593, 595, 597, 599, 601, 603, 605, 607, 609, 611, 613, 615, 617, 619, 621, 623, 625, or 627, a variant, derivative, orthologue, paralogue or homologue thereof, in which:

[1156] the amino acid at Mutated site 4 is Asn, and the amino acid at Mutated site 5 is Pro.

[1157] In another preferred embodiment, the mutated PPO comprises a sequence of SEQ ID NO: 1, 2, 3, 4, 5, 6, 7, 8, 9, 10, 11, 12, 13, 14, 15, 16, 17, 18, 19, 20, 21, 22, 23, 24, 25, 26, 27, 28, 29, 30, 31, 32, 33, 34, 35, 36, 37, 38, 39, 40, 41, 42, 43, 44, 45, 46, 47, 48, 49, 50, 51, 52, 53, 54, 55, 56, 57, 58, 59, 60, 61, 62, 63, 64, 65, 66, 67, 68, 69, 70, 71, 72, 73, 74, 75, 76, 77, 78, 79, 80, 81, 82, 83, 84, 85, 86, 87, 88, 89, 90, 91, 92, 93, 94, 95, 96, 97, 98, 99, 100, 101, 102, 103, 104, 105, 106, 107, 108, 109, 110, 111, 112, 113, 114, 115, 116, 117, 577, 579, 581, 583, 585, 587, 589, 591, 593, 595, 597, 599, 601, 603, 605, 607, 609, 611, 613, 615, 617, 619, 621, 623, 625, or 627, a variant, derivative, orthologue, paralogue or homologue thereof, in which:

[1158] the amino acid at Mutated site 4 is Asn, and the amino acid at Mutated site 5 is Arg.

[1159] In another preferred embodiment, the mutated PPO comprises a sequence of SEQ ID NO: 1, 2, 3, 4, 5, 6, 7, 8, 9, 10, 11, 12, 13, 14, 15, 16, 17, 18, 19, 20, 21, 22, 23, 24, 25, 26, 27, 28, 29, 30, 31, 32, 33, 34, 35, 36, 37, 38, 39, 40, 41, 42, 43, 44, 45, 46, 47, 48, 49, 50, 51, 52, 53, 54, 55, 56, 57, 58, 59, 60, 61, 62, 63, 64, 65, 66, 67, 68, 69, 70, 71, 72, 73, 74, 75, 76, 77, 78, 79, 80, 81, 82, 83, 84, 85, 86, 87, 88, 89, 90, 91, 92, 93, 94, 95, 96, 97, 98, 99, 100, 101, 102, 103, 104, 105, 106, 107, 108, 109, 110, 111, 112, 113, 114, 115, 116, 117, 577, 579, 581, 583, 585, 587, 589, 591, 593, 595, 597, 599, 601, 603, 605, 607, 609, 611, 613, 615, 617, 619, 621, 623, 625, or 627, a variant, derivative, orthologue, paralogue or homologue thereof, in which:

[1160] the amino acid at Mutated site 4 is Asn, and the amino acid at Mutated site 5 is Tyr.

[1161] In another preferred embodiment, the mutated PPO comprises a sequence of SEQ ID NO: 1, 2, 3, 4, 5, 6, 7, 8, 9, 10, 11, 12, 13, 14, 15, 16, 17, 18, 19, 20, 21, 22, 23, 24, 25, 26, 27, 28, 29, 30, 31, 32, 33, 34, 35, 36, 37, 38, 39, 40, 41, 42, 43, 44, 45, 46, 47, 48, 49, 50, 51, 52, 53, 54, 55, 56, 57, 58, 59, 60, 61, 62, 63, 64, 65, 66, 67, 68, 69, 70, 71, 72, 73, 74, 75, 76, 77, 78, 79, 80, 81, 82, 83, 84, 85, 86, 87, 88, 89, 90, 91, 92, 93, 94, 95, 96, 97, 98, 99, 100, 101, 102, 103, 104, 105, 106, 107, 108, 109, 110, 111, 112, 113, 114, 115, 116, 117, 577, 579, 581, 583, 585, 587, 589, 591, 593, 595, 597, 599, 601, 603, 605, 607, 609, 611, 613, 615, 617, 619, 621, 623, 625, or 627, a variant, derivative, orthologue, paralogue or homologue thereof, in which:

[1162] the amino acid at Mutated site 4 is Asn, and the amino acid at Mutated site 5 is Trp.

[1163] In another preferred embodiment, the mutated PPO comprises a sequence of SEQ ID NO: 1, 2, 3, 4, 5, 6, 7, 8, 9, 10, 11, 12, 13, 14, 15, 16, 17, 18, 19, 20, 21, 22, 23, 24, 25, 26, 27, 28, 29, 30, 31, 32, 33, 34, 35, 36, 37, 38, 39, 40, 41, 42, 43, 44, 45, 46, 47, 48, 49, 50, 51, 52, 53, 54, 55, 56, 57, 58, 59, 60, 61, 62, 63, 64, 65, 66, 67, 68, 69, 70, 71, 72, 73, 74, 75, 76, 77, 78, 79, 80, 81, 82, 83, 84, 85, 86, 87, 88, 89, 90, 91, 92, 93, 94, 95, 96, 97, 98, 99, 100, 101, 102, 103, 104, 105, 106, 107, 108, 109, 110, 111, 112, 113, 114, 115, 116, 117, 577, 579, 581, 583, 585, 587, 589, 591, 593, 595, 597, 599, 601, 603, 605, 607, 609, 611, 613, 615, 617, 619, 621, 623, 625, or 627, a variant, derivative, orthologue, paralogue or homologue thereof, in which:

[1164] the amino acid at Mutated site 4 is Gln, and the amino acid at Mutated site 5 is Ala.

[1165] In another preferred embodiment, the mutated PPO comprises a sequence of SEQ ID NO: 1, 2, 3, 4, 5, 6, 7, 8, 9, 10, 11, 12, 13, 14, 15, 16, 17, 18, 19, 20, 21, 22, 23, 24, 25, 26, 27, 28, 29, 30, 31, 32, 33, 34, 35, 36, 37, 38, 39, 40, 41, 42, 43, 44, 45, 46, 47, 48, 49, 50, 51, 52, 53, 54, 55, 56, 57, 58, 59, 60, 61, 62, 63, 64, 65, 66, 67, 68, 69, 70, 71, 72, 73, 74, 75, 76, 77, 78, 79, 80, 81, 82, 83, 84, 85, 86, 87, 88, 89, 90, 91, 92, 93, 94, 95, 96, 97, 98, 99, 100, 101, 102, 103, 104, 105, 106, 107, 108, 109, 110, 111, 112, 113, 114, 115, 116, 117, 577, 579, 581, 583, 585, 587, 589, 591, 593, 595, 597, 599, 601, 603, 605, 607, 609, 611, 613, 615, 617, 619, 621, 623, 625, or 627, a variant, derivative, orthologue, paralogue or homologue thereof, in which:

[1166] the amino acid at Mutated site 4 is Gln, and the amino acid at Mutated site 5 is Leu.

[1167] In another preferred embodiment, the mutated PPO comprises a sequence of SEQ ID NO: 1, 2, 3, 4, 5, 6, 7, 8, 9, 10, 11, 12, 13, 14, 15, 16, 17, 18, 19, 20, 21, 22, 23, 24, 25, 26, 27, 28, 29, 30, 31, 32, 33, 34, 35, 36, 37, 38, 39, 40, 41, 42, 43, 44, 45, 46, 47, 48, 49, 50, 51, 52, 53, 54, 55, 56, 57, 58, 59, 60, 61, 62, 63, 64, 65, 66, 67, 68, 69, 70, 71, 72, 73, 74, 75, 76, 77, 78, 79, 80, 81, 82, 83, 84, 85, 86, 87, 88, 89, 90, 91, 92, 93, 94, 95, 96, 97, 98, 99, 100, 101, 102, 103, 104, 105, 106, 107, 108, 109, 110, 111, 112, 113, 114, 115, 116, 117, 577, 579, 581, 583, 585, 587, 589, 591, 593, 595, 597, 599, 601, 603, 605, 607, 609, 611, 613, 615, 617, 619, 621, 623, 625, or 627, a variant, derivative, orthologue, paralogue or homologue thereof, in which:

[1168] the amino acid at Mutated site 4 is Gln, and the amino acid at Mutated site 5 is Val.

[1169] In another preferred embodiment, the mutated PPO comprises a sequence of SEQ ID NO: 1, 2, 3, 4, 5, 6, 7, 8, 9, 10, 11, 12, 13, 14, 15, 16, 17, 18, 19, 20, 21, 22, 23, 24, 25, 26, 27, 28, 29, 30, 31, 32, 33, 34, 35, 36, 37, 38, 39, 40, 41, 42, 43, 44, 45, 46, 47, 48, 49, 50, 51, 52, 53, 54, 55, 56, 57, 58, 59, 60, 61, 62, 63, 64, 65, 66, 67, 68, 69, 70, 71, 72, 73, 74, 75, 76, 77, 78, 79, 80, 81, 82, 83, 84, 85, 86, 87, 88, 89, 90, 91, 92, 93, 94, 95, 96, 97, 98, 99, 100, 101, 102, 103, 104, 105, 106, 107, 108, 109, 110, 111, 112, 113, 114, 115, 116, 117, 577, 579, 581, 583, 585, 587, 589, 591, 593, 595, 597, 599, 601, 603, 605, 607, 609, 611, 613, 615, 617, 619, 621, 623, 625, or 627, a variant, derivative, orthologue, paralogue or homologue thereof, in which:

[1170] the amino acid at Mutated site 4 is Gln, and the amino acid at Mutated site 5 is Ile.

[1171] In another preferred embodiment, the mutated PPO comprises a sequence of SEQ ID NO: 1, 2, 3, 4, 5, 6, 7, 8, 9, 10, 11, 12, 13, 14, 15, 16, 17, 18, 19, 20, 21, 22, 23, 24, 25, 26, 27, 28, 29, 30, 31, 32, 33, 34, 35, 36, 37, 38, 39, 40, 41, 42, 43, 44, 45, 46, 47, 48, 49, 50, 51, 52, 53, 54, 55, 56, 57, 58, 59, 60, 61, 62, 63, 64, 65, 66, 67, 68, 69, 70, 71, 72, 73, 74, 75, 76, 77, 78, 79, 80, 81, 82, 83, 84, 85, 86, 87, 88, 89, 90, 91, 92, 93, 94, 95, 96, 97, 98, 99, 100, 101, 102, 103, 104, 105, 106, 107, 108, 109, 110, 111, 112, 113, 114, 115, 116, 117, 577, 579, 581, 583, 585, 587, 589, 591, 593, 595, 597, 599, 601, 603, 605, 607, 609, 611, 613, 615, 617, 619, 621, 623, 625, or 627, a variant, derivative, orthologue, paralogue or homologue thereof, in which:

[1172] the amino acid at Mutated site 4 is Gln, and the amino acid at Mutated site 5 is Met.

[1173] In another preferred embodiment, the mutated PPO comprises a sequence of SEQ ID NO: 1, 2, 3, 4, 5, 6, 7, 8, 9, 10, 11, 12, 13, 14, 15, 16, 17, 18, 19, 20, 21, 22, 23, 24, 25, 26, 27, 28, 29, 30, 31, 32, 33, 34, 35, 36, 37, 38, 39, 40, 41, 42, 43, 44, 45, 46, 47, 48, 49, 50, 51, 52, 53, 54, 55, 56, 57, 58, 59, 60, 61, 62, 63, 64, 65, 66, 67, 68, 69, 70, 71, 72, 73, 74, 75, 76, 77, 78, 79, 80, 81, 82, 83, 84, 85, 86, 87, 88, 89, 90, 91, 92, 93, 94, 95, 96, 97, 98, 99, 100, 101, 102, 103, 104, 105, 106, 107, 108, 109, 110, 111, 112, 113, 114, 115, 116, 117, 577, 579, 581, 583, 585, 587, 589, 591, 593, 595, 597, 599, 601, 603, 605, 607, 609, 611, 613, 615, 617, 619, 621, 623, 625, or 627, a variant, derivative, orthologue, paralogue or homologue thereof, in which:

[1174] the amino acid at Mutated site 4 is Gln, and the amino acid at Mutated site 5 is His.

[1175] In another preferred embodiment, the mutated PPO comprises a sequence of SEQ ID NO: 1, 2, 3, 4, 5, 6, 7, 8, 9, 10, 11, 12, 13, 14, 15, 16, 17, 18, 19, 20, 21, 22, 23, 24, 25, 26, 27, 28, 29, 30, 31, 32, 33, 34, 35, 36, 37, 38, 39, 40, 41, 42, 43, 44, 45, 46, 47, 48, 49, 50, 51, 52, 53, 54, 55, 56, 57, 58, 59, 60, 61, 62, 63, 64, 65, 66, 67, 68, 69, 70, 71, 72, 73, 74, 75, 76, 77, 78, 79, 80, 81, 82, 83, 84, 85, 86, 87, 88, 89, 90, 91, 92, 93, 94, 95, 96, 97, 98, 99, 100, 101, 102, 103, 104, 105, 106, 107, 108, 109, 110, 111, 112, 113, 114, 115, 116, 117, 577, 579, 581, 583, 585, 587, 589, 591, 593, 595, 597, 599, 601, 603, 605, 607, 609, 611, 613, 615, 617, 619, 621, 623, 625, or 627, a variant, derivative, orthologue, paralogue or homologue thereof, in which:

[1176] the amino acid at Mutated site 4 is Gln, and the amino acid at Mutated site 5 is Lys.

[1177] In another preferred embodiment, the mutated PPO comprises a sequence of SEQ ID NO: 1, 2, 3, 4, 5, 6, 7, 8, 9, 10, 11, 12, 13, 14, 15, 16, 17, 18, 19, 20, 21, 22, 23, 24, 25, 26, 27, 28, 29, 30, 31, 32, 33, 34, 35, 36, 37, 38, 39, 40, 41, 42, 43, 44, 45, 46, 47, 48, 49, 50, 51, 52, 53, 54, 55, 56, 57, 58, 59, 60, 61, 62, 63, 64, 65, 66, 67, 68, 69, 70, 71, 72, 73, 74, 75, 76, 77, 78, 79, 80, 81, 82, 83, 84, 85, 86, 87, 88, 89, 90, 91, 92, 93, 94, 95, 96, 97, 98, 99, 100, 101, 102, 103, 104, 105, 106, 107, 108, 109, 110, 111, 112, 113, 114, 115, 116, 117, 577, 579, 581, 583, 585, 587, 589, 591, 593, 595, 597, 599, 601, 603, 605, 607, 609, 611, 613, 615, 617, 619, 621, 623, 625, or 627, a variant, derivative, orthologue, paralogue or homologue thereof, in which:

[1178] the amino acid at Mutated site 4 is Gln, and the amino acid at Mutated site 5 is Asp.

[1179] In another preferred embodiment, the mutated PPO comprises a sequence of SEQ ID NO: 1, 2, 3, 4, 5, 6, 7, 8, 9, 10, 11, 12, 13, 14, 15, 16, 17, 18, 19, 20, 21, 22, 23, 24, 25, 26, 27, 28, 29, 30, 31, 32, 33, 34, 35, 36, 37, 38, 39, 40, 41, 42, 43, 44, 45, 46, 47, 48, 49, 50, 51, 52, 53, 54, 55, 56, 57, 58, 59, 60, 61, 62, 63, 64, 65, 66, 67, 68, 69, 70, 71, 72, 73, 74, 75, 76, 77, 78, 79, 80, 81, 82, 83, 84, 85, 86, 87, 88, 89, 90, 91, 92, 93, 94, 95, 96, 97, 98, 99, 100, 101, 102, 103, 104, 105, 106, 107, 108, 109, 110, 111, 112, 113, 114, 115, 116, 117, 577, 579, 581, 583, 585, 587, 589, 591, 593, 595, 597, 599, 601, 603, 605, 607, 609, 611, 613, 615, 617, 619, 621, 623, 625, or 627, a variant, derivative, orthologue, paralogue or homologue thereof, in which:

[1180] the amino acid at Mutated site 4 is Gln, and the amino acid at Mutated site 5 is Glu.

[1181] In another preferred embodiment, the mutated PPO comprises a sequence of SEQ ID NO: 1, 2, 3, 4, 5, 6, 7, 8, 9, 10, 11, 12, 13, 14, 15, 16, 17, 18, 19, 20, 21, 22, 23, 24, 25, 26, 27, 28, 29, 30, 31, 32, 33, 34, 35, 36, 37, 38, 39, 40, 41, 42, 43, 44, 45, 46, 47, 48, 49, 50, 51, 52, 53, 54, 55, 56, 57, 58, 59, 60, 61, 62, 63, 64, 65, 66, 67, 68, 69, 70, 71, 72, 73, 74, 75, 76, 77, 78, 79, 80, 81, 82, 83, 84, 85, 86, 87, 88, 89, 90, 91, 92, 93, 94, 95, 96, 97, 98, 99, 100, 101, 102, 103, 104, 105, 106, 107, 108, 109, 110, 111, 112, 113, 114, 115, 116, 117, 577, 579, 581, 583, 585, 587, 589, 591, 593, 595, 597, 599, 601, 603, 605, 607, 609, 611, 613, 615, 617, 619, 621, 623, 625, or 627, a variant, derivative, orthologue, paralogue or homologue thereof, in which:

[1182] the amino acid at Mutated site 4 is Gln, and the amino acid at Mutated site 5 is Ser.

[1183] In another preferred embodiment, the mutated PPO comprises a sequence of SEQ ID NO: 1, 2, 3, 4, 5, 6, 7, 8, 9, 10, 11, 12, 13, 14, 15, 16, 17, 18, 19, 20, 21, 22, 23, 24, 25, 26, 27, 28, 29, 30, 31, 32, 33, 34, 35, 36, 37, 38, 39, 40, 41, 42, 43, 44, 45, 46, 47, 48, 49, 50, 51, 52, 53, 54, 55, 56, 57, 58, 59, 60, 61, 62, 63, 64, 65, 66, 67, 68, 69, 70, 71, 72, 73, 74, 75, 76, 77, 78, 79, 80, 81, 82, 83, 84, 85, 86, 87, 88, 89, 90, 91, 92, 93, 94, 95, 96, 97, 98, 99, 100, 101, 102, 103, 104, 105, 106, 107, 108, 109, 110, 111, 112, 113, 114, 115, 116, 117, 577, 579, 581, 583, 585, 587, 589, 591, 593, 595, 597, 599, 601, 603, 605, 607, 609, 611, 613, 615, 617, 619, 621, 623, 625, or 627, a variant, derivative, orthologue, paralogue or homologue thereof, in which:

[1184] the amino acid at Mutated site 4 is Gln, and the amino acid at Mutated site 5 is Thr.

[1185] In another preferred embodiment, the mutated PPO comprises a sequence of SEQ ID NO: 1, 2, 3, 4, 5, 6, 7, 8, 9, 10, 11, 12, 13, 14, 15, 16, 17, 18, 19, 20, 21, 22, 23, 24, 25, 26, 27, 28, 29, 30, 31, 32, 33, 34, 35, 36, 37, 38, 39, 40, 41, 42, 43, 44, 45, 46, 47, 48, 49, 50, 51, 52, 53, 54, 55, 56, 57, 58, 59, 60, 61, 62, 63, 64, 65, 66, 67, 68, 69, 70, 71, 72, 73, 74, 75, 76, 77, 78, 79, 80, 81, 82, 83, 84, 85, 86, 87, 88, 89, 90, 91, 92, 93, 94, 95, 96, 97, 98, 99, 100, 101, 102, 103, 104, 105, 106, 107, 108, 109, 110, 111, 112, 113, 114, 115, 116, 117, 577, 579, 581, 583, 585, 587, 589, 591, 593, 595, 597, 599, 601, 603, 605, 607, 609, 611, 613, 615, 617, 619, 621, 623, 625, or 627, a variant, derivative, orthologue, paralogue or homologue thereof, in which:

[1186] the amino acid at Mutated site 4 is Gln, and the amino acid at Mutated site 5 is Asn.

[1187] In another preferred embodiment, the mutated PPO comprises a sequence of SEQ ID NO: 1, 2, 3, 4, 5, 6, 7, 8, 9, 10, 11, 12, 13, 14, 15, 16, 17, 18, 19, 20, 21, 22, 23, 24, 25, 26, 27, 28, 29, 30, 31, 32, 33, 34, 35, 36, 37, 38, 39, 40, 41, 42, 43, 44, 45, 46, 47, 48, 49, 50, 51, 52, 53, 54, 55, 56, 57, 58, 59, 60, 61, 62, 63, 64, 65, 66, 67, 68, 69, 70, 71, 72, 73, 74, 75, 76, 77, 78, 79, 80, 81, 82, 83, 84, 85, 86, 87, 88, 89, 90, 91, 92, 93, 94, 95, 96, 97, 98, 99, 100, 101, 102, 103, 104, 105, 106, 107, 108, 109, 110, 111, 112, 113, 114, 115, 116, 117, 577, 579, 581, 583, 585, 587, 589, 591, 593, 595, 597, 599, 601, 603, 605, 607, 609, 611, 613, 615, 617, 619, 621, 623, 625, or 627, a variant, derivative, orthologue, paralogue or homologue thereof, in which:

[1188] the amino acid at Mutated site 4 is Gln, and the amino acid at Mutated site 5 is Gln.

[1189] In another preferred embodiment, the mutated PPO comprises a sequence of SEQ ID NO: 1, 2, 3, 4, 5, 6, 7, 8, 9, 10, 11, 12, 13, 14, 15, 16, 17, 18, 19, 20, 21, 22, 23, 24, 25, 26, 27, 28, 29, 30, 31, 32, 33, 34, 35, 36, 37, 38, 39, 40, 41, 42, 43, 44, 45, 46, 47, 48, 49, 50, 51, 52, 53, 54, 55, 56, 57, 58, 59, 60, 61, 62, 63, 64, 65, 66, 67, 68, 69, 70, 71, 72, 73, 74, 75, 76, 77, 78, 79, 80, 81, 82, 83, 84, 85, 86, 87, 88, 89, 90, 91, 92, 93, 94, 95, 96, 97, 98, 99, 100, 101, 102, 103, 104, 105, 106, 107, 108, 109, 110, 111, 112, 113, 114, 115, 116, 117, 577, 579, 581, 583, 585, 587, 589, 591, 593, 595, 597, 599, 601, 603, 605, 607, 609, 611, 613, 615, 617, 619, 621, 623, 625, or 627, a variant, derivative, orthologue, paralogue or homologue thereof, in which:

[1190] the amino acid at Mutated site 4 is Gln, and the amino acid at Mutated site 5 is Cys.

[1191] In another preferred embodiment, the mutated PPO comprises a sequence of SEQ ID NO: 1, 2, 3, 4, 5, 6, 7, 8, 9, 10, 11, 12, 13, 14, 15, 16, 17, 18, 19, 20, 21, 22, 23, 24, 25, 26, 27, 28, 29, 30, 31, 32, 33, 34, 35, 36, 37, 38, 39, 40, 41, 42, 43, 44, 45, 46, 47, 48, 49, 50, 51, 52, 53, 54, 55, 56, 57, 58, 59, 60, 61, 62, 63, 64, 65, 66, 67, 68, 69, 70, 71, 72, 73, 74, 75, 76, 77, 78, 79, 80, 81, 82, 83, 84, 85, 86, 87, 88, 89, 90, 91, 92, 93, 94, 95, 96, 97, 98, 99, 100, 101, 102, 103, 104, 105, 106, 107, 108, 109, 110, 111, 112, 113, 114, 115, 116, 117, 577, 579, 581, 583, 585, 587, 589, 591, 593, 595, 597, 599, 601, 603, 605, 607, 609, 611, 613, 615, 617, 619, 621, 623, 625, or 627, a variant, derivative, orthologue, paralogue or homologue thereof, in which:

[1192] the amino acid at Mutated site 4 is Gln, and the amino acid at Mutated site 5 is Gly.

[1193] In another preferred embodiment, the mutated PPO comprises a sequence of SEQ ID NO: 1, 2, 3, 4, 5, 6, 7, 8, 9, 10, 11, 12, 13, 14, 15, 16, 17, 18, 19, 20, 21, 22, 23, 24, 25, 26, 27, 28, 29, 30, 31, 32, 33, 34, 35, 36, 37, 38, 39, 40, 41, 42, 43, 44, 45, 46, 47, 48, 49, 50, 51, 52, 53, 54, 55, 56, 57, 58, 59, 60, 61, 62, 63, 64, 65, 66, 67, 68, 69, 70, 71, 72, 73, 74, 75, 76, 77, 78, 79, 80, 81, 82, 83, 84, 85, 86, 87, 88, 89, 90, 91, 92, 93, 94, 95, 96, 97, 98, 99, 100, 101, 102, 103, 104, 105, 106, 107, 108, 109, 110, 111, 112, 113, 114, 115, 116, 117, 577, 579, 581, 583, 585, 587, 589, 591, 593, 595, 597, 599, 601, 603, 605, 607, 609, 611, 613, 615, 617, 619, 621, 623, 625, or 627, a variant, derivative, orthologue, paralogue or homologue thereof, in which:

[1194] the amino acid at Mutated site 4 is Gln, and the amino acid at Mutated site 5 is Pro.

[1195] In another preferred embodiment, the mutated PPO comprises a sequence of SEQ ID NO: 1, 2, 3, 4, 5, 6, 7, 8, 9, 10, 11, 12, 13, 14, 15, 16, 17, 18, 19, 20, 21, 22, 23, 24, 25, 26, 27, 28, 29, 30, 31, 32, 33, 34, 35, 36, 37, 38, 39, 40, 41, 42, 43, 44, 45, 46, 47, 48, 49, 50, 51, 52, 53, 54, 55, 56, 57, 58, 59, 60, 61, 62, 63, 64, 65, 66, 67, 68, 69, 70, 71, 72, 73, 74, 75, 76, 77, 78, 79, 80, 81, 82, 83, 84, 85, 86, 87, 88, 89, 90, 91, 92, 93, 94, 95, 96, 97, 98, 99, 100, 101, 102, 103, 104, 105, 106, 107, 108, 109, 110, 111, 112, 113, 114, 115, 116, 117, 577, 579, 581, 583, 585, 587, 589, 591, 593, 595, 597, 599, 601, 603, 605, 607, 609, 611, 613, 615, 617, 619, 621, 623, 625, or 627, a variant, derivative, orthologue, paralogue or homologue thereof, in which:

[1196] the amino acid at Mutated site 4 is Gln, and the amino acid at Mutated site 5 is Arg.

[1197] In another preferred embodiment, the mutated PPO comprises a sequence of SEQ ID NO: 1, 2, 3, 4, 5, 6, 7, 8, 9, 10, 11, 12, 13, 14, 15, 16, 17, 18, 19, 20, 21, 22, 23, 24, 25, 26, 27, 28, 29, 30, 31, 32, 33, 34, 35, 36, 37, 38, 39, 40, 41, 42, 43, 44, 45, 46, 47, 48, 49, 50, 51, 52, 53, 54, 55, 56, 57, 58, 59, 60, 61, 62, 63, 64, 65, 66, 67, 68, 69, 70, 71, 72, 73, 74, 75, 76, 77, 78, 79, 80, 81, 82, 83, 84, 85, 86, 87, 88, 89, 90, 91, 92, 93, 94, 95, 96, 97, 98, 99, 100, 101, 102, 103, 104, 105, 106, 107, 108, 109, 110, 111, 112, 113, 114, 115, 116, 117, 577, 579, 581, 583, 585, 587, 589, 591, 593, 595, 597, 599, 601, 603, 605, 607, 609, 611, 613, 615, 617, 619, 621, 623, 625, or 627, a variant, derivative, orthologue, paralogue or homologue thereof, in which:

[1198] the amino acid at Mutated site 4 is Gln, and the amino acid at Mutated site 5 is Tyr.

[1199] In another preferred embodiment, the mutated PPO comprises a sequence of SEQ ID NO: 1, 2, 3, 4, 5, 6, 7, 8, 9, 10, 11, 12, 13, 14, 15, 16, 17, 18, 19, 20, 21, 22, 23, 24, 25, 26, 27, 28, 29, 30, 31, 32, 33, 34, 35, 36, 37, 38, 39, 40, 41, 42, 43, 44, 45, 46, 47, 48, 49, 50, 51, 52, 53, 54, 55, 56, 57, 58, 59, 60, 61, 62, 63, 64, 65, 66, 67, 68, 69, 70, 71, 72, 73, 74, 75, 76, 77, 78, 79, 80, 81, 82, 83, 84, 85, 86, 87, 88, 89, 90, 91, 92, 93, 94, 95, 96, 97, 98, 99, 100, 101, 102, 103, 104, 105, 106, 107, 108, 109, 110, 111, 112, 113, 114, 115, 116, 117, 577, 579, 581, 583, 585, 587, 589, 591, 593, 595, 597, 599, 601, 603, 605, 607, 609, 611, 613, 615, 617, 619, 621, 623, 625, or 627, a variant, derivative, orthologue, paralogue or homologue thereof, in which:

[1200] the amino acid at Mutated site 4 is Gln, and the amino acid at Mutated site 5 is Trp.

[1201] In another preferred embodiment, the mutated PPO comprises a sequence of SEQ ID NO: 1, 2, 3, 4, 5, 6, 7, 8, 9, 10, 11, 12, 13, 14, 15, 16, 17, 18, 19, 20, 21, 22, 23, 24, 25, 26, 27, 28, 29, 30, 31, 32, 33, 34, 35, 36, 37, 38, 39, 40, 41, 42, 43, 44, 45, 46, 47, 48, 49, 50, 51, 52, 53, 54, 55, 56, 57, 58, 59, 60, 61, 62, 63, 64, 65, 66, 67, 68, 69, 70, 71, 72, 73, 74, 75, 76, 77, 78, 79, 80, 81, 82, 83, 84, 85, 86, 87, 88, 89, 90, 91, 92, 93, 94, 95, 96, 97, 98, 99, 100, 101, 102, 103, 104, 105, 106, 107, 108, 109, 110, 111, 112, 113, 114, 115, 116, 117, 577, 579, 581, 583, 585, 587, 589, 591, 593, 595, 597, 599, 601, 603, 605, 607, 609, 611, 613, 615, 617, 619, 621, 623, 625, or 627, a variant, derivative, orthologue, paralogue or homologue thereof, in which:

[1202] the amino acid at Mutated site 4 is Cys, and the amino acid at Mutated site 5 is Ala.

[1203] In another preferred embodiment, the mutated PPO comprises a sequence of SEQ ID NO: 1, 2, 3, 4, 5, 6, 7, 8, 9, 10, 11, 12, 13, 14, 15, 16, 17, 18, 19, 20, 21, 22, 23, 24, 25, 26, 27, 28, 29, 30, 31, 32, 33, 34, 35, 36, 37, 38, 39, 40, 41, 42, 43, 44, 45, 46, 47, 48, 49, 50, 51, 52, 53, 54, 55, 56, 57, 58, 59, 60, 61, 62, 63, 64, 65, 66, 67, 68, 69, 70, 71, 72, 73, 74, 75, 76, 77, 78, 79, 80, 81, 82, 83, 84, 85, 86, 87, 88, 89, 90, 91, 92, 93, 94, 95, 96, 97, 98, 99, 100, 101, 102, 103, 104, 105, 106, 107, 108, 109, 110, 111, 112, 113, 114, 115, 116, 117, 577, 579, 581, 583, 585, 587, 589, 591, 593, 595, 597, 599, 601, 603, 605, 607, 609, 611, 613, 615, 617, 619, 621, 623, 625, or 627, a variant, derivative, orthologue, paralogue or homologue thereof, in which:

[1204] the amino acid at Mutated site 4 is Cys, and the amino acid at Mutated site 5 is Leu.

[1205] In another preferred embodiment, the mutated PPO comprises a sequence of SEQ ID NO: 1, 2, 3, 4, 5, 6, 7, 8, 9, 10, 11, 12, 13, 14, 15, 16, 17, 18, 19, 20, 21, 22, 23, 24, 25, 26, 27, 28, 29, 30, 31, 32, 33, 34, 35, 36, 37, 38, 39, 40, 41, 42, 43, 44, 45, 46, 47, 48, 49, 50, 51, 52, 53, 54, 55, 56, 57, 58, 59, 60, 61, 62, 63, 64, 65, 66, 67, 68, 69, 70, 71, 72, 73, 74, 75, 76, 77, 78, 79, 80, 81, 82, 83, 84, 85, 86, 87, 88, 89, 90, 91, 92, 93, 94, 95, 96, 97, 98, 99, 100, 101, 102, 103, 104, 105, 106, 107, 108, 109, 110, 111, 112, 113, 114, 115, 116, 117, 577, 579, 581, 583, 585, 587, 589, 591, 593, 595, 597, 599, 601, 603, 605, 607, 609, 611, 613, 615, 617, 619, 621, 623, 625, or 627, a variant, derivative, orthologue, paralogue or homologue thereof, in which:

[1206] the amino acid at Mutated site 4 is Cys, and the amino acid at Mutated site 5 is Val.

[1207] In another preferred embodiment, the mutated PPO comprises a sequence of SEQ ID NO: 1, 2, 3, 4, 5, 6, 7, 8, 9, 10, 11, 12, 13, 14, 15, 16, 17, 18, 19, 20, 21, 22, 23, 24, 25, 26, 27, 28, 29, 30, 31, 32, 33, 34, 35, 36, 37, 38, 39, 40, 41, 42, 43, 44, 45, 46, 47, 48, 49, 50, 51, 52, 53, 54, 55, 56, 57, 58, 59, 60, 61, 62, 63, 64, 65, 66, 67, 68, 69, 70, 71, 72, 73, 74, 75, 76, 77, 78, 79, 80, 81, 82, 83, 84, 85, 86, 87, 88, 89, 90, 91, 92, 93, 94, 95, 96, 97, 98, 99, 100, 101, 102, 103, 104, 105, 106, 107, 108, 109, 110, 111, 112, 113, 114, 115, 116, 117, 577, 579, 581, 583, 585, 587, 589, 591, 593, 595, 597, 599, 601, 603, 605, 607, 609, 611, 613, 615, 617, 619, 621, 623, 625, or 627, a variant, derivative, orthologue, paralogue or homologue thereof, in which:

[1208] the amino acid at Mutated site 4 is Cys, and the amino acid at Mutated site 5 is Ile.

[1209] In another preferred embodiment, the mutated PPO comprises a sequence of SEQ ID NO: 1, 2, 3, 4, 5, 6, 7, 8, 9, 10, 11, 12, 13, 14, 15, 16, 17, 18, 19, 20, 21, 22, 23, 24, 25, 26, 27, 28, 29, 30, 31, 32, 33, 34, 35, 36, 37, 38, 39, 40, 41, 42, 43, 44, 45, 46, 47, 48, 49, 50, 51, 52, 53, 54, 55, 56, 57, 58, 59, 60, 61, 62, 63, 64, 65, 66, 67, 68, 69, 70, 71, 72, 73, 74, 75, 76, 77, 78, 79, 80, 81, 82, 83, 84, 85, 86, 87, 88, 89, 90, 91, 92, 93, 94, 95, 96, 97, 98, 99, 100, 101, 102, 103, 104, 105, 106, 107, 108, 109, 110, 111, 112, 113, 114, 115, 116, 117, 577, 579, 581, 583, 585, 587, 589, 591, 593, 595, 597, 599, 601, 603, 605, 607, 609, 611, 613, 615, 617, 619, 621, 623, 625, or 627, a variant, derivative, orthologue, paralogue or homologue thereof, in which:

[1210] the amino acid at Mutated site 4 is Cys, and the amino acid at Mutated site 5 is Met.

[1211] In another preferred embodiment, the mutated PPO comprises a sequence of SEQ ID NO: 1, 2, 3, 4, 5, 6, 7, 8, 9, 10, 11, 12, 13, 14, 15, 16, 17, 18, 19, 20, 21, 22, 23, 24, 25, 26, 27, 28, 29, 30, 31, 32, 33, 34, 35, 36, 37, 38, 39, 40, 41, 42, 43, 44, 45, 46, 47, 48, 49, 50, 51, 52, 53, 54, 55, 56, 57, 58, 59, 60, 61, 62, 63, 64, 65, 66, 67, 68, 69, 70, 71, 72, 73, 74, 75, 76, 77, 78, 79, 80, 81, 82, 83, 84, 85, 86, 87, 88, 89, 90, 91, 92, 93, 94, 95, 96, 97, 98, 99, 100, 101, 102, 103, 104, 105, 106, 107, 108, 109, 110, 111, 112, 113, 114, 115, 116, 117, 577, 579, 581, 583, 585, 587, 589, 591, 593, 595, 597, 599, 601, 603, 605, 607, 609, 611, 613, 615, 617, 619, 621, 623, 625, or 627, a variant, derivative, orthologue, paralogue or homologue thereof, in which:

[1212] the amino acid at Mutated site 4 is Cys, and the amino acid at Mutated site 5 is His.

[1213] In another preferred embodiment, the mutated PPO comprises a sequence of SEQ ID NO: 1, 2, 3, 4, 5, 6, 7, 8, 9, 10, 11, 12, 13, 14, 15, 16, 17, 18, 19, 20, 21, 22, 23, 24, 25, 26, 27, 28, 29, 30, 31, 32, 33, 34, 35, 36, 37, 38, 39, 40, 41, 42, 43, 44, 45, 46, 47, 48, 49, 50, 51, 52, 53, 54, 55, 56, 57, 58, 59, 60, 61, 62, 63, 64, 65, 66, 67, 68, 69, 70, 71, 72, 73, 74, 75, 76, 77, 78, 79, 80, 81, 82, 83, 84, 85, 86, 87, 88, 89, 90, 91, 92, 93, 94, 95, 96, 97, 98, 99, 100, 101, 102, 103, 104, 105, 106, 107, 108, 109, 110, 111, 112, 113, 114, 115, 116, 117, 577, 579, 581, 583, 585, 587, 589, 591, 593, 595, 597, 599, 601, 603, 605, 607, 609, 611, 613, 615, 617, 619, 621, 623, 625, or 627, a variant, derivative, orthologue, paralogue or homologue thereof, in which:

[1214] the amino acid at Mutated site 4 is Cys, and the amino acid at Mutated site 5 is Lys.

[1215] In another preferred embodiment, the mutated PPO comprises a sequence of SEQ ID NO: 1, 2, 3, 4, 5, 6, 7, 8, 9, 10, 11, 12, 13, 14, 15, 16, 17, 18, 19, 20, 21, 22, 23, 24, 25, 26, 27, 28, 29, 30, 31, 32, 33, 34, 35, 36, 37, 38, 39, 40, 41, 42, 43, 44, 45, 46, 47, 48, 49, 50, 51, 52, 53, 54, 55, 56, 57, 58, 59, 60, 61, 62, 63, 64, 65, 66, 67, 68, 69, 70, 71, 72, 73, 74, 75, 76, 77, 78, 79, 80, 81, 82, 83, 84, 85, 86, 87, 88, 89, 90, 91, 92, 93, 94, 95, 96, 97, 98, 99, 100, 101, 102, 103, 104, 105, 106, 107, 108, 109, 110, 111, 112, 113, 114, 115, 116, 117, 577, 579, 581, 583, 585, 587, 589, 591, 593, 595, 597, 599, 601, 603, 605, 607, 609, 611, 613, 615, 617, 619, 621, 623, 625, or 627, a variant, derivative, orthologue, paralogue or homologue thereof, in which:

[1216] the amino acid at Mutated site 4 is Cys, and the amino acid at Mutated site 5 is Asp.

[1217] In another preferred embodiment, the mutated PPO comprises a sequence of SEQ ID NO: 1, 2, 3, 4, 5, 6, 7, 8, 9, 10, 11, 12, 13, 14, 15, 16, 17, 18, 19, 20, 21, 22, 23, 24, 25, 26, 27, 28, 29, 30, 31, 32, 33, 34, 35, 36, 37, 38, 39, 40, 41, 42, 43, 44, 45, 46, 47, 48, 49, 50, 51, 52, 53, 54, 55, 56, 57, 58, 59, 60, 61, 62, 63, 64, 65, 66, 67, 68, 69, 70, 71, 72, 73, 74, 75, 76, 77, 78, 79, 80, 81, 82, 83, 84, 85, 86, 87, 88, 89, 90, 91, 92, 93, 94, 95, 96, 97, 98, 99, 100, 101, 102, 103, 104, 105, 106, 107, 108, 109, 110, 111, 112, 113, 114, 115, 116, 117, 577, 579, 581, 583, 585, 587, 589, 591, 593, 595, 597, 599, 601, 603, 605, 607, 609, 611, 613, 615, 617, 619, 621, 623, 625, or 627, a variant, derivative, orthologue, paralogue or homologue thereof, in which:

[1218] the amino acid at Mutated site 4 is Cys, and the amino acid at Mutated site 5 is Glu.

[1219] In another preferred embodiment, the mutated PPO comprises a sequence of SEQ ID NO: 1, 2, 3, 4, 5, 6, 7, 8, 9, 10, 11, 12, 13, 14, 15, 16, 17, 18, 19, 20, 21, 22, 23, 24, 25, 26, 27, 28, 29, 30, 31, 32, 33, 34, 35, 36, 37, 38, 39, 40, 41, 42, 43, 44, 45, 46, 47, 48, 49, 50, 51, 52, 53, 54, 55, 56, 57, 58, 59, 60, 61, 62, 63, 64, 65, 66, 67, 68, 69, 70, 71, 72, 73, 74, 75, 76, 77, 78, 79, 80, 81, 82, 83, 84, 85, 86, 87, 88, 89, 90, 91, 92, 93, 94, 95, 96, 97, 98, 99, 100, 101, 102, 103, 104, 105, 106, 107, 108, 109, 110, 111, 112, 113, 114, 115, 116, 117, 577, 579, 581, 583, 585, 587, 589, 591, 593, 595, 597, 599, 601, 603, 605, 607, 609, 611, 613, 615, 617, 619, 621, 623, 625, or 627, a variant, derivative, orthologue, paralogue or homologue thereof, in which:

[1220] the amino acid at Mutated site 4 is Cys, and the amino acid at Mutated site 5 is Ser.

[1221] In another preferred embodiment, the mutated PPO comprises a sequence of SEQ ID NO: 1, 2, 3, 4, 5, 6, 7, 8, 9, 10, 11, 12, 13, 14, 15, 16, 17, 18, 19, 20, 21, 22, 23, 24, 25, 26, 27, 28, 29, 30, 31, 32, 33, 34, 35, 36, 37, 38, 39, 40, 41, 42, 43, 44, 45, 46, 47, 48, 49, 50, 51, 52, 53, 54, 55, 56, 57, 58, 59, 60, 61, 62, 63, 64, 65, 66, 67, 68, 69, 70, 71, 72, 73, 74, 75, 76, 77, 78, 79, 80, 81, 82, 83, 84, 85, 86, 87, 88, 89, 90, 91, 92, 93, 94, 95, 96, 97, 98, 99, 100, 101, 102, 103, 104, 105, 106, 107, 108, 109, 110, 111, 112, 113, 114, 115, 116, 117, 577, 579, 581, 583, 585, 587, 589, 591, 593, 595, 597, 599, 601, 603, 605, 607, 609, 611, 613, 615, 617, 619, 621, 623, 625, or 627, a variant, derivative, orthologue, paralogue or homologue thereof, in which:

[1222] the amino acid at Mutated site 4 is Cys, and the amino acid at Mutated site 5 is Thr.

[1223] In another preferred embodiment, the mutated PPO comprises a sequence of SEQ ID NO: 1, 2, 3, 4, 5, 6, 7, 8, 9, 10, 11, 12, 13, 14, 15, 16, 17, 18, 19, 20, 21, 22, 23, 24, 25, 26, 27, 28, 29, 30, 31, 32, 33, 34, 35, 36, 37, 38, 39, 40, 41, 42, 43, 44, 45, 46, 47, 48, 49, 50, 51, 52, 53, 54, 55, 56, 57, 58, 59, 60, 61, 62, 63, 64, 65, 66, 67, 68, 69, 70, 71, 72, 73, 74, 75, 76, 77, 78, 79, 80, 81, 82, 83, 84, 85, 86, 87, 88, 89, 90, 91, 92, 93, 94, 95, 96, 97, 98, 99, 100, 101, 102, 103, 104, 105, 106, 107, 108, 109, 110, 111, 112, 113, 114, 115, 116, 117, 577, 579, 581, 583, 585, 587, 589, 591, 593, 595, 597, 599, 601, 603, 605, 607, 609, 611, 613, 615, 617, 619, 621, 623, 625, or 627, a variant, derivative, orthologue, paralogue or homologue thereof, in which:

[1224] the amino acid at Mutated site 4 is Cys, and the amino acid at Mutated site 5 is Asn.

[1225] In another preferred embodiment, the mutated PPO comprises a sequence of SEQ ID NO: 1, 2, 3, 4, 5, 6, 7, 8, 9, 10, 11, 12, 13, 14, 15, 16, 17, 18, 19, 20, 21, 22, 23, 24, 25, 26, 27, 28, 29, 30, 31, 32, 33, 34, 35, 36, 37, 38, 39, 40, 41, 42, 43, 44, 45, 46, 47, 48, 49, 50, 51, 52, 53, 54, 55, 56, 57, 58, 59, 60, 61, 62, 63, 64, 65, 66, 67, 68, 69, 70, 71, 72, 73, 74, 75, 76, 77, 78, 79, 80, 81, 82, 83, 84, 85, 86, 87, 88, 89, 90, 91, 92, 93, 94, 95, 96, 97, 98, 99, 100, 101, 102, 103, 104, 105, 106, 107, 108, 109, 110, 111, 112, 113, 114, 115, 116, 117, 577, 579, 581, 583, 585, 587, 589, 591, 593, 595, 597, 599, 601, 603, 605, 607, 609, 611, 613, 615, 617, 619, 621, 623, 625, or 627, a variant, derivative, orthologue, paralogue or homologue thereof, in which:

[1226] the amino acid at Mutated site 4 is Cys, and the amino acid at Mutated site 5 is Gln.

[1227] In another preferred embodiment, the mutated PPO comprises a sequence of SEQ ID NO: 1, 2, 3, 4, 5, 6, 7, 8, 9, 10, 11, 12, 13, 14, 15, 16, 17, 18, 19, 20, 21, 22, 23, 24, 25, 26, 27, 28, 29, 30, 31, 32, 33, 34, 35, 36, 37, 38, 39, 40, 41, 42, 43, 44, 45, 46, 47, 48, 49, 50, 51, 52, 53, 54, 55, 56, 57, 58, 59, 60, 61, 62, 63, 64, 65, 66, 67, 68, 69, 70, 71, 72, 73, 74, 75, 76, 77, 78, 79, 80, 81, 82, 83, 84, 85, 86, 87, 88, 89, 90, 91, 92, 93, 94, 95, 96, 97, 98, 99, 100, 101, 102, 103, 104, 105, 106, 107, 108, 109, 110, 111, 112, 113, 114, 115, 116, 117, 577, 579, 581, 583, 585, 587, 589, 591, 593, 595, 597, 599, 601, 603, 605, 607, 609, 611, 613, 615, 617, 619, 621, 623, 625, or 627, a variant, derivative, orthologue, paralogue or homologue thereof, in which:

[1228] the amino acid at Mutated site 4 is Cys, and the amino acid at Mutated site 5 is Cys.

[1229] In another preferred embodiment, the mutated PPO comprises a sequence of SEQ ID NO: 1, 2, 3, 4, 5, 6, 7, 8, 9, 10, 11, 12, 13, 14, 15, 16, 17, 18, 19, 20, 21, 22, 23, 24, 25, 26, 27, 28, 29, 30, 31, 32, 33, 34, 35, 36, 37, 38, 39, 40, 41, 42, 43, 44, 45, 46, 47, 48, 49, 50, 51, 52, 53, 54, 55, 56, 57, 58, 59, 60, 61, 62, 63, 64, 65, 66, 67, 68, 69, 70, 71, 72, 73, 74, 75, 76, 77, 78, 79, 80, 81, 82, 83, 84, 85, 86, 87, 88, 89, 90, 91, 92, 93, 94, 95, 96, 97, 98, 99, 100, 101, 102, 103, 104, 105, 106, 107, 108, 109, 110, 111, 112, 113, 114, 115, 116, 117, 577, 579, 581, 583, 585, 587, 589, 591, 593, 595, 597, 599, 601, 603, 605, 607, 609, 611, 613, 615, 617, 619, 621, 623, 625, or 627, a variant, derivative, orthologue, paralogue or homologue thereof, in which:

[1230] the amino acid at Mutated site 4 is Cys, and the amino acid at Mutated site 5 is Gly.

[1231] In another preferred embodiment, the mutated PPO comprises a sequence of SEQ ID NO: 1, 2, 3, 4, 5, 6, 7, 8, 9, 10, 11, 12, 13, 14, 15, 16, 17, 18, 19, 20, 21, 22, 23, 24, 25, 26, 27, 28, 29, 30, 31, 32, 33, 34, 35, 36, 37, 38, 39, 40, 41, 42, 43, 44, 45, 46, 47, 48, 49, 50, 51, 52, 53, 54, 55, 56, 57, 58, 59, 60, 61, 62, 63, 64, 65, 66, 67, 68, 69, 70, 71, 72, 73, 74, 75, 76, 77, 78, 79, 80, 81, 82, 83, 84, 85, 86, 87, 88, 89, 90, 91, 92, 93, 94, 95, 96, 97, 98, 99, 100, 101, 102, 103, 104, 105, 106, 107, 108, 109, 110, 111, 112, 113, 114, 115, 116, 117, 577, 579, 581, 583, 585, 587, 589, 591, 593, 595, 597, 599, 601, 603, 605, 607, 609, 611, 613, 615, 617, 619, 621, 623, 625, or 627, a variant, derivative, orthologue, paralogue or homologue thereof, in which:

[1232] the amino acid at Mutated site 4 is Cys, and the amino acid at Mutated site 5 is Pro.

[1233] In another preferred embodiment, the mutated PPO comprises a sequence of SEQ ID NO: 1, 2, 3, 4, 5, 6, 7, 8, 9, 10, 11, 12, 13, 14, 15, 16, 17, 18, 19, 20, 21, 22, 23, 24, 25, 26, 27, 28, 29, 30, 31, 32, 33, 34, 35, 36, 37, 38, 39, 40, 41, 42, 43, 44, 45, 46, 47, 48, 49, 50, 51, 52, 53, 54, 55, 56, 57, 58, 59, 60, 61, 62, 63, 64, 65, 66, 67, 68, 69, 70, 71, 72, 73, 74, 75, 76, 77, 78, 79, 80, 81, 82, 83, 84, 85, 86, 87, 88, 89, 90, 91, 92, 93, 94, 95, 96, 97, 98, 99, 100, 101, 102, 103, 104, 105, 106, 107, 108, 109, 110, 111, 112, 113, 114, 115, 116, 117, 577, 579, 581, 583, 585, 587, 589, 591, 593, 595, 597, 599, 601, 603, 605, 607, 609, 611, 613, 615, 617, 619, 621, 623, 625, or 627, a variant, derivative, orthologue, paralogue or homologue thereof, in which:

[1234] the amino acid at Mutated site 4 is Cys, and the amino acid at Mutated site 5 is Arg.

[1235] In another preferred embodiment, the mutated PPO comprises a sequence of SEQ ID NO: 1, 2, 3, 4, 5, 6, 7, 8, 9, 10, 11, 12, 13, 14, 15, 16, 17, 18, 19, 20, 21, 22, 23, 24, 25, 26, 27, 28, 29, 30, 31, 32, 33, 34, 35, 36, 37, 38, 39, 40, 41, 42, 43, 44, 45, 46, 47, 48, 49, 50, 51, 52, 53, 54, 55, 56, 57, 58, 59, 60, 61, 62, 63, 64, 65, 66, 67, 68, 69, 70, 71, 72, 73, 74, 75, 76, 77, 78, 79, 80, 81, 82, 83, 84, 85, 86, 87, 88, 89, 90, 91, 92, 93, 94, 95, 96, 97, 98, 99, 100, 101, 102, 103, 104, 105, 106, 107, 108, 109, 110, 111, 112, 113, 114, 115, 116, 117, 577, 579, 581, 583, 585, 587, 589, 591, 593, 595, 597, 599, 601, 603, 605, 607, 609, 611, 613, 615, 617, 619, 621, 623, 625, or 627, a variant, derivative, orthologue, paralogue or homologue thereof, in which:

[1236] the amino acid at Mutated site 4 is Cys, and the amino acid at Mutated site 5 is Tyr.

[1237] In another preferred embodiment, the mutated PPO comprises a sequence of SEQ ID NO: 1, 2, 3, 4, 5, 6, 7, 8, 9, 10, 11, 12, 13, 14, 15, 16, 17, 18, 19, 20, 21, 22, 23, 24, 25, 26, 27, 28, 29, 30, 31, 32, 33, 34, 35, 36, 37, 38, 39, 40, 41, 42, 43, 44, 45, 46, 47, 48, 49, 50, 51, 52, 53, 54, 55, 56, 57, 58, 59, 60, 61, 62, 63, 64, 65, 66, 67, 68, 69, 70, 71, 72, 73, 74, 75, 76, 77, 78, 79, 80, 81, 82, 83, 84, 85, 86, 87, 88, 89, 90, 91, 92, 93, 94, 95, 96, 97, 98, 99, 100, 101, 102, 103, 104, 105, 106, 107, 108, 109, 110, 111, 112, 113, 114, 115, 116, 117, 577, 579, 581, 583, 585, 587, 589, 591, 593, 595, 597, 599, 601, 603, 605, 607, 609, 611, 613, 615, 617, 619, 621, 623, 625, or 627, a variant, derivative, orthologue, paralogue or homologue thereof, in which:

[1238] the amino acid at Mutated site 4 is Cys, and the amino acid at Mutated site 5 is Trp.

[1239] In another preferred embodiment, the mutated PPO comprises a sequence of SEQ ID NO: 1, 2, 3, 4, 5, 6, 7, 8, 9, 10, 11, 12, 13, 14, 15, 16, 17, 18, 19, 20, 21, 22, 23, 24, 25, 26, 27, 28, 29, 30, 31, 32, 33, 34, 35, 36, 37, 38, 39, 40, 41, 42, 43, 44, 45, 46, 47, 48, 49, 50, 51, 52, 53, 54, 55, 56, 57, 58, 59, 60, 61, 62, 63, 64, 65, 66, 67, 68, 69, 70, 71, 72, 73, 74, 75, 76, 77, 78, 79, 80, 81, 82, 83, 84, 85, 86, 87, 88, 89, 90, 91, 92, 93, 94, 95, 96, 97, 98, 99, 100, 101, 102, 103, 104, 105, 106, 107, 108, 109, 110, 111, 112, 113, 114, 115, 116, 117, 577, 579, 581, 583, 585, 587, 589, 591, 593, 595, 597, 599, 601, 603, 605, 607, 609, 611, 613, 615, 617, 619, 621, 623, 625, or 627, a variant, derivative, orthologue, paralogue or homologue thereof, in which:

[1240] the amino acid at Mutated site 4 is Gly, and the amino acid at Mutated site 5 is Ala.

[1241] In another preferred embodiment, the mutated PPO comprises a sequence of SEQ ID NO: 1, 2, 3, 4, 5, 6, 7, 8, 9, 10, 11, 12, 13, 14, 15, 16, 17, 18, 19, 20, 21, 22, 23, 24, 25, 26, 27, 28, 29, 30, 31, 32, 33, 34, 35, 36, 37, 38, 39, 40, 41, 42, 43, 44, 45, 46, 47, 48, 49, 50, 51, 52, 53, 54, 55, 56, 57, 58, 59, 60, 61, 62, 63, 64, 65, 66, 67, 68, 69, 70, 71, 72, 73, 74, 75, 76, 77, 78, 79, 80, 81, 82, 83, 84, 85, 86, 87, 88, 89, 90, 91, 92, 93, 94, 95, 96, 97, 98, 99, 100, 101, 102, 103, 104, 105, 106, 107, 108, 109, 110, 111, 112, 113, 114, 115, 116, 117, 577, 579, 581, 583, 585, 587, 589, 591, 593, 595, 597, 599, 601, 603, 605, 607, 609, 611, 613, 615, 617, 619, 621, 623, 625, or 627, a variant, derivative, orthologue, paralogue or homologue thereof, in which:

[1242] the amino acid at Mutated site 4 is Gly, and the amino acid at Mutated site 5 is Leu.

[1243] In another preferred embodiment, the mutated PPO comprises a sequence of SEQ ID NO: 1, 2, 3, 4, 5, 6, 7, 8, 9, 10, 11, 12, 13, 14, 15, 16, 17, 18, 19, 20, 21, 22, 23, 24, 25, 26, 27, 28, 29, 30, 31, 32, 33, 34, 35, 36, 37, 38, 39, 40, 41, 42, 43, 44, 45, 46, 47, 48, 49, 50, 51, 52, 53, 54, 55, 56, 57, 58, 59, 60, 61, 62, 63, 64, 65, 66, 67, 68, 69, 70, 71, 72, 73, 74, 75, 76, 77, 78, 79, 80, 81, 82, 83, 84, 85, 86, 87, 88, 89, 90, 91, 92, 93, 94, 95, 96, 97, 98, 99, 100, 101, 102, 103, 104, 105, 106, 107, 108, 109, 110, 111, 112, 113, 114, 115, 116, 117, 577, 579, 581, 583, 585, 587, 589, 591, 593, 595, 597, 599, 601, 603, 605, 607, 609, 611, 613, 615, 617, 619, 621, 623, 625, or 627, a variant, derivative, orthologue, paralogue or homologue thereof, in which:

[1244] the amino acid at Mutated site 4 is Gly, and the amino acid at Mutated site 5 is Val.

[1245] In another preferred embodiment, the mutated PPO comprises a sequence of SEQ ID NO: 1, 2, 3, 4, 5, 6, 7, 8, 9, 10, 11, 12, 13, 14, 15, 16, 17, 18, 19, 20, 21, 22, 23, 24, 25, 26, 27, 28, 29, 30, 31, 32, 33, 34, 35, 36, 37, 38, 39, 40, 41, 42, 43, 44, 45, 46, 47, 48, 49, 50, 51, 52, 53, 54, 55, 56, 57, 58, 59, 60, 61, 62, 63, 64, 65, 66, 67, 68, 69, 70, 71, 72, 73, 74, 75, 76, 77, 78, 79, 80, 81, 82, 83, 84, 85, 86, 87, 88, 89, 90, 91, 92, 93, 94, 95, 96, 97, 98, 99, 100, 101, 102, 103, 104, 105, 106, 107, 108, 109, 110, 111, 112, 113, 114, 115, 116, 117, 577, 579, 581, 583, 585, 587, 589, 591, 593, 595, 597, 599, 601, 603, 605, 607, 609, 611, 613, 615, 617, 619, 621, 623, 625, or 627, a variant, derivative, orthologue, paralogue or homologue thereof, in which:

[1246] the amino acid at Mutated site 4 is Gly, and the amino acid at Mutated site 5 is Ile.

[1247] In another preferred embodiment, the mutated PPO comprises a sequence of SEQ ID NO: 1, 2, 3, 4, 5, 6, 7, 8, 9, 10, 11, 12, 13, 14, 15, 16, 17, 18, 19, 20, 21, 22, 23, 24, 25, 26, 27, 28, 29, 30, 31, 32, 33, 34, 35, 36, 37, 38, 39, 40, 41, 42, 43, 44, 45, 46, 47, 48, 49, 50, 51, 52, 53, 54, 55, 56, 57, 58, 59, 60, 61, 62, 63, 64, 65, 66, 67, 68, 69, 70, 71, 72, 73, 74, 75, 76, 77, 78, 79, 80, 81, 82, 83, 84, 85, 86, 87, 88, 89, 90, 91, 92, 93, 94, 95, 96, 97, 98, 99, 100, 101, 102, 103, 104, 105, 106, 107, 108, 109, 110, 111, 112, 113, 114, 115, 116, 117, 577, 579, 581, 583, 585, 587, 589, 591, 593, 595, 597, 599, 601, 603, 605, 607, 609, 611, 613, 615, 617, 619, 621, 623, 625, or 627, a variant, derivative, orthologue, paralogue or homologue thereof, in which:

[1248] the amino acid at Mutated site 4 is Gly, and the amino acid at Mutated site 5 is Met.

[1249] In another preferred embodiment, the mutated PPO comprises a sequence of SEQ ID NO: 1, 2, 3, 4, 5, 6, 7, 8, 9, 10, 11, 12, 13, 14, 15, 16, 17, 18, 19, 20, 21, 22, 23, 24, 25, 26, 27, 28, 29, 30, 31, 32, 33, 34, 35, 36, 37, 38, 39, 40, 41, 42, 43, 44, 45, 46, 47, 48, 49, 50, 51, 52, 53, 54, 55, 56, 57, 58, 59, 60, 61, 62, 63, 64, 65, 66, 67, 68, 69, 70, 71, 72, 73, 74, 75, 76, 77, 78, 79, 80, 81, 82, 83, 84, 85, 86, 87, 88, 89, 90, 91, 92, 93, 94, 95, 96, 97, 98, 99, 100, 101, 102, 103, 104, 105, 106, 107, 108, 109, 110, 111, 112, 113, 114, 115, 116, 117, 577, 579, 581, 583, 585, 587, 589, 591, 593, 595, 597, 599, 601, 603, 605, 607, 609, 611, 613, 615, 617, 619, 621, 623, 625, or 627, a variant, derivative, orthologue, paralogue or homologue thereof, in which:

[1250] the amino acid at Mutated site 4 is Gly, and the amino acid at Mutated site 5 is His.

[1251] In another preferred embodiment, the mutated PPO comprises a sequence of SEQ ID NO: 1, 2, 3, 4, 5, 6, 7, 8, 9, 10, 11, 12, 13, 14, 15, 16, 17, 18, 19, 20, 21, 22, 23, 24, 25, 26, 27, 28, 29, 30, 31, 32, 33, 34, 35, 36, 37, 38, 39, 40, 41, 42, 43, 44, 45, 46, 47, 48, 49, 50, 51, 52, 53, 54, 55, 56, 57, 58, 59, 60, 61, 62, 63, 64, 65, 66, 67, 68, 69, 70, 71, 72, 73, 74, 75, 76, 77, 78, 79, 80, 81, 82, 83, 84, 85, 86, 87, 88, 89, 90, 91, 92, 93, 94, 95, 96, 97, 98, 99, 100, 101, 102, 103, 104, 105, 106, 107, 108, 109, 110, 111, 112, 113, 114, 115, 116, 117, 577, 579, 581, 583, 585, 587, 589, 591, 593, 595, 597, 599, 601, 603, 605, 607, 609, 611, 613, 615, 617, 619, 621, 623, 625, or 627, a variant, derivative, orthologue, paralogue or homologue thereof, in which:

[1252] the amino acid at Mutated site 4 is Gly, and the amino acid at Mutated site 5 is Lys.

[1253] In another preferred embodiment, the mutated PPO comprises a sequence of SEQ ID NO: 1, 2, 3, 4, 5, 6, 7, 8, 9, 10, 11, 12, 13, 14, 15, 16, 17, 18, 19, 20, 21, 22, 23, 24, 25, 26, 27, 28, 29, 30, 31, 32, 33, 34, 35, 36, 37, 38, 39, 40, 41, 42, 43, 44, 45, 46, 47, 48, 49, 50, 51, 52, 53, 54, 55, 56, 57, 58, 59, 60, 61, 62, 63, 64, 65, 66, 67, 68, 69, 70, 71, 72, 73, 74, 75, 76, 77, 78, 79, 80, 81, 82, 83, 84, 85, 86, 87, 88, 89, 90, 91, 92, 93, 94, 95, 96, 97, 98, 99, 100, 101, 102, 103, 104, 105, 106, 107, 108, 109, 110, 111, 112, 113, 114, 115, 116, 117, 577, 579, 581, 583, 585, 587, 589, 591, 593, 595, 597, 599, 601, 603, 605, 607, 609, 611, 613, 615, 617, 619, 621, 623, 625, or 627, a variant, derivative, orthologue, paralogue or homologue thereof, in which:

[1254] the amino acid at Mutated site 4 is Gly, and the amino acid at Mutated site 5 is Asp.

[1255] In another preferred embodiment, the mutated PPO comprises a sequence of SEQ ID NO: 1, 2, 3, 4, 5, 6, 7, 8, 9, 10, 11, 12, 13, 14, 15, 16, 17, 18, 19, 20, 21, 22, 23, 24, 25, 26, 27, 28, 29, 30, 31, 32, 33, 34, 35, 36, 37, 38, 39, 40, 41, 42, 43, 44, 45, 46, 47, 48, 49, 50, 51, 52, 53, 54, 55, 56, 57, 58, 59, 60, 61, 62, 63, 64, 65, 66, 67, 68, 69, 70, 71, 72, 73, 74, 75, 76, 77, 78, 79, 80, 81, 82, 83, 84, 85, 86, 87, 88, 89, 90, 91, 92, 93, 94, 95, 96, 97, 98, 99, 100, 101, 102, 103, 104, 105, 106, 107, 108, 109, 110, 111, 112, 113, 114, 115, 116, 117, 577, 579, 581, 583, 585, 587, 589, 591, 593, 595, 597, 599, 601, 603, 605, 607, 609, 611, 613, 615, 617, 619, 621, 623, 625, or 627, a variant, derivative, orthologue, paralogue or homologue thereof, in which:

[1256] the amino acid at Mutated site 4 is Gly, and the amino acid at Mutated site 5 is Glu.

[1257] In another preferred embodiment, the mutated PPO comprises a sequence of SEQ ID NO: 1, 2, 3, 4, 5, 6, 7, 8, 9, 10, 11, 12, 13, 14, 15, 16, 17, 18, 19, 20, 21, 22, 23, 24, 25, 26, 27, 28, 29, 30, 31, 32, 33, 34, 35, 36, 37, 38, 39, 40, 41, 42, 43, 44, 45, 46, 47, 48, 49, 50, 51, 52, 53, 54, 55, 56, 57, 58, 59, 60, 61, 62, 63, 64, 65, 66, 67, 68, 69, 70, 71, 72, 73, 74, 75, 76, 77, 78, 79, 80, 81, 82, 83, 84, 85, 86, 87, 88, 89, 90, 91, 92, 93, 94, 95, 96, 97, 98, 99, 100, 101, 102, 103, 104, 105, 106, 107, 108, 109, 110, 111, 112, 113, 114, 115, 116, 117, 577, 579, 581, 583, 585, 587, 589, 591, 593, 595, 597, 599, 601, 603, 605, 607, 609, 611, 613, 615, 617, 619, 621, 623, 625, or 627, a variant, derivative, orthologue, paralogue or homologue thereof, in which:

[1258] the amino acid at Mutated site 4 is Gly, and the amino acid at Mutated site 5 is Ser.

[1259] In another preferred embodiment, the mutated PPO comprises a sequence of SEQ ID NO: 1, 2, 3, 4, 5, 6, 7, 8, 9, 10, 11, 12, 13, 14, 15, 16, 17, 18, 19, 20, 21, 22, 23, 24, 25, 26, 27, 28, 29, 30, 31, 32, 33, 34, 35, 36, 37, 38, 39, 40, 41, 42, 43, 44, 45, 46, 47, 48, 49, 50, 51, 52, 53, 54, 55, 56, 57, 58, 59, 60, 61, 62, 63, 64, 65, 66, 67, 68, 69, 70, 71, 72, 73, 74, 75, 76, 77, 78, 79, 80, 81, 82, 83, 84, 85, 86, 87, 88, 89, 90, 91, 92, 93, 94, 95, 96, 97, 98, 99, 100, 101, 102, 103, 104, 105, 106, 107, 108, 109, 110, 111, 112, 113, 114, 115, 116, 117, 577, 579, 581, 583, 585, 587, 589, 591, 593, 595, 597, 599, 601, 603, 605, 607, 609, 611, 613, 615, 617, 619, 621, 623, 625, or 627, a variant, derivative, orthologue, paralogue or homologue thereof, in which:

[1260] the amino acid at Mutated site 4 is Gly, and the amino acid at Mutated site 5 is Thr.

[1261] In another preferred embodiment, the mutated PPO comprises a sequence of SEQ ID NO: 1, 2, 3, 4, 5, 6, 7, 8, 9, 10, 11, 12, 13, 14, 15, 16, 17, 18, 19, 20, 21, 22, 23, 24, 25, 26, 27, 28, 29, 30, 31, 32, 33, 34, 35, 36, 37, 38, 39, 40, 41, 42, 43, 44, 45, 46, 47, 48, 49, 50, 51, 52, 53, 54, 55, 56, 57, 58, 59, 60, 61, 62, 63, 64, 65, 66, 67, 68, 69, 70, 71, 72, 73, 74, 75, 76, 77, 78, 79, 80, 81, 82, 83, 84, 85, 86, 87, 88, 89, 90, 91, 92, 93, 94, 95, 96, 97, 98, 99, 100, 101, 102, 103, 104, 105, 106, 107, 108, 109, 110, 111, 112, 113, 114, 115, 116, 117, 577, 579, 581, 583, 585, 587, 589, 591, 593, 595, 597, 599, 601, 603, 605, 607, 609, 611, 613, 615, 617, 619, 621, 623, 625, or 627, a variant, derivative, orthologue, paralogue or homologue thereof, in which:

[1262] the amino acid at Mutated site 4 is Gly, and the amino acid at Mutated site 5 is Asn.

[1263] In another preferred embodiment, the mutated PPO comprises a sequence of SEQ ID NO: 1, 2, 3, 4, 5, 6, 7, 8, 9, 10, 11, 12, 13, 14, 15, 16, 17, 18, 19, 20, 21, 22, 23, 24, 25, 26, 27, 28, 29, 30, 31, 32, 33, 34, 35, 36, 37, 38, 39, 40, 41, 42, 43, 44, 45, 46, 47, 48, 49, 50, 51, 52, 53, 54, 55, 56, 57, 58, 59, 60, 61, 62, 63, 64, 65, 66, 67, 68, 69, 70, 71, 72, 73, 74, 75, 76, 77, 78, 79, 80, 81, 82, 83, 84, 85, 86, 87, 88, 89, 90, 91, 92, 93, 94, 95, 96, 97, 98, 99, 100, 101, 102, 103, 104, 105, 106, 107, 108, 109, 110, 111, 112, 113, 114, 115, 116, 117, 577, 579, 581, 583, 585, 587, 589, 591, 593, 595, 597, 599, 601, 603, 605, 607, 609, 611, 613, 615, 617, 619, 621, 623, 625, or 627, a variant, derivative, orthologue, paralogue or homologue thereof, in which:

[1264] the amino acid at Mutated site 4 is Gly, and the amino acid at Mutated site 5 is Gln.

[1265] In another preferred embodiment, the mutated PPO comprises a sequence of SEQ ID NO: 1, 2, 3, 4, 5, 6, 7, 8, 9, 10, 11, 12, 13, 14, 15, 16, 17, 18, 19, 20, 21, 22, 23, 24, 25, 26, 27, 28, 29, 30, 31, 32, 33, 34, 35, 36, 37, 38, 39, 40, 41, 42, 43, 44, 45, 46, 47, 48, 49, 50, 51, 52, 53, 54, 55, 56, 57, 58, 59, 60, 61, 62, 63, 64, 65, 66, 67, 68, 69, 70, 71, 72, 73, 74, 75, 76, 77, 78, 79, 80, 81, 82, 83, 84, 85, 86, 87, 88, 89, 90, 91, 92, 93, 94, 95, 96, 97, 98, 99, 100, 101, 102, 103, 104, 105, 106, 107, 108, 109, 110, 111, 112, 113, 114, 115, 116, 117, 577, 579, 581, 583, 585, 587, 589, 591, 593, 595, 597, 599, 601, 603, 605, 607, 609, 611, 613, 615, 617, 619, 621, 623, 625, or 627, a variant, derivative, orthologue, paralogue or homologue thereof, in which:

[1266] the amino acid at Mutated site 4 is Gly, and the amino acid at Mutated site 5 is Cys.

[1267] In another preferred embodiment, the mutated PPO comprises a sequence of SEQ ID NO: 1, 2, 3, 4, 5, 6, 7, 8, 9, 10, 11, 12, 13, 14, 15, 16, 17, 18, 19, 20, 21, 22, 23, 24, 25, 26, 27, 28, 29, 30, 31, 32, 33, 34, 35, 36, 37, 38, 39, 40, 41, 42, 43, 44, 45, 46, 47, 48, 49, 50, 51, 52, 53, 54, 55, 56, 57, 58, 59, 60, 61, 62, 63, 64, 65, 66, 67, 68, 69, 70, 71, 72, 73, 74, 75, 76, 77, 78, 79, 80, 81, 82, 83, 84, 85, 86, 87, 88, 89, 90, 91, 92, 93, 94, 95, 96, 97, 98, 99, 100, 101, 102, 103, 104, 105, 106, 107, 108, 109, 110, 111, 112, 113, 114, 115, 116, 117, 577, 579, 581, 583, 585, 587, 589, 591, 593, 595, 597, 599, 601, 603, 605, 607, 609, 611, 613, 615, 617, 619, 621, 623, 625, or 627, a variant, derivative, orthologue, paralogue or homologue thereof, in which:

[1268] the amino acid at Mutated site 4 is Gly, and the amino acid at Mutated site 5 is Gly.

[1269] In another preferred embodiment, the mutated PPO comprises a sequence of SEQ ID NO: 1, 2, 3, 4, 5, 6, 7, 8, 9, 10, 11, 12, 13, 14, 15, 16, 17, 18, 19, 20, 21, 22, 23, 24, 25, 26, 27, 28, 29, 30, 31, 32, 33, 34, 35, 36, 37, 38, 39, 40, 41, 42, 43, 44, 45, 46, 47, 48, 49, 50, 51, 52, 53, 54, 55, 56, 57, 58, 59, 60, 61, 62, 63, 64, 65, 66, 67, 68, 69, 70, 71, 72, 73, 74, 75, 76, 77, 78, 79, 80, 81, 82, 83, 84, 85, 86, 87, 88, 89, 90, 91, 92, 93, 94, 95, 96, 97, 98, 99, 100, 101, 102, 103, 104, 105, 106, 107, 108, 109, 110, 111, 112, 113, 114, 115, 116, 117, 577, 579, 581, 583, 585, 587, 589, 591, 593, 595, 597, 599, 601, 603, 605, 607, 609, 611, 613, 615, 617, 619, 621, 623, 625, or 627, a variant, derivative, orthologue, paralogue or homologue thereof, in which:

[1270] the amino acid at Mutated site 4 is Gly, and the amino acid at Mutated site 5 is Pro.

[1271] In another preferred embodiment, the mutated PPO comprises a sequence of SEQ ID NO: 1, 2, 3, 4, 5, 6, 7, 8, 9, 10, 11, 12, 13, 14, 15, 16, 17, 18, 19, 20, 21, 22, 23, 24, 25, 26, 27, 28, 29, 30, 31, 32, 33, 34, 35, 36, 37, 38, 39, 40, 41, 42, 43, 44, 45, 46, 47, 48, 49, 50, 51, 52, 53, 54, 55, 56, 57, 58, 59, 60, 61, 62, 63, 64, 65, 66, 67, 68, 69, 70, 71, 72, 73, 74, 75, 76, 77, 78, 79, 80, 81, 82, 83, 84, 85, 86, 87, 88, 89, 90, 91, 92, 93, 94, 95, 96, 97, 98, 99, 100, 101, 102, 103, 104, 105, 106, 107, 108, 109, 110, 111, 112, 113, 114, 115, 116, 117, 577, 579, 581, 583, 585, 587, 589, 591, 593, 595, 597, 599, 601, 603, 605, 607, 609, 611, 613, 615, 617, 619, 621, 623, 625, or 627, a variant, derivative, orthologue, paralogue or homologue thereof, in which:

[1272] the amino acid at Mutated site 4 is Gly, and the amino acid at Mutated site 5 is Arg.

[1273] In another preferred embodiment, the mutated PPO comprises a sequence of SEQ ID NO: 1, 2, 3, 4, 5, 6, 7, 8, 9, 10, 11, 12, 13, 14, 15, 16, 17, 18, 19, 20, 21, 22, 23, 24, 25, 26, 27, 28, 29, 30, 31, 32, 33, 34, 35, 36, 37, 38, 39, 40, 41, 42, 43, 44, 45, 46, 47, 48, 49, 50, 51, 52, 53, 54, 55, 56, 57, 58, 59, 60, 61, 62, 63, 64, 65, 66, 67, 68, 69, 70, 71, 72, 73, 74, 75, 76, 77, 78, 79, 80, 81, 82, 83, 84, 85, 86, 87, 88, 89, 90, 91, 92, 93, 94, 95, 96, 97, 98, 99, 100, 101, 102, 103, 104, 105, 106, 107, 108, 109, 110, 111, 112, 113, 114, 115, 116, 117, 577, 579, 581, 583, 585, 587, 589, 591, 593, 595, 597, 599, 601, 603, 605, 607, 609, 611, 613, 615, 617, 619, 621, 623, 625, or 627, a variant, derivative, orthologue, paralogue or homologue thereof, in which:

[1274] the amino acid at Mutated site 4 is Gly, and the amino acid at Mutated site 5 is Tyr.

[1275] In another preferred embodiment, the mutated PPO comprises a sequence of SEQ ID NO: 1, 2, 3, 4, 5, 6, 7, 8, 9, 10, 11, 12, 13, 14, 15, 16, 17, 18, 19, 20, 21, 22, 23, 24, 25, 26, 27, 28, 29, 30, 31, 32, 33, 34, 35, 36, 37, 38, 39, 40, 41, 42, 43, 44, 45, 46, 47, 48, 49, 50, 51, 52, 53, 54, 55, 56, 57, 58, 59, 60, 61, 62, 63, 64, 65, 66, 67, 68, 69, 70, 71, 72, 73, 74, 75, 76, 77, 78, 79, 80, 81, 82, 83, 84, 85, 86, 87, 88, 89, 90, 91, 92, 93, 94, 95, 96, 97, 98, 99, 100, 101, 102, 103, 104, 105, 106, 107, 108, 109, 110, 111, 112, 113, 114, 115, 116, 117, 577, 579, 581, 583, 585, 587, 589, 591, 593, 595, 597, 599, 601, 603, 605, 607, 609, 611, 613, 615, 617, 619, 621, 623, 625, or 627, a variant, derivative, orthologue, paralogue or homologue thereof, in which:

[1276] the amino acid at Mutated site 4 is Gly, and the amino acid at Mutated site 5 is Trp.

[1277] In another preferred embodiment, the mutated PPO comprises a sequence of SEQ ID NO: 1, 2, 3, 4, 5, 6, 7, 8, 9, 10, 11, 12, 13, 14, 15, 16, 17, 18, 19, 20, 21, 22, 23, 24, 25, 26, 27, 28, 29, 30, 31, 32, 33, 34, 35, 36, 37, 38, 39, 40, 41, 42, 43, 44, 45, 46, 47, 48, 49, 50, 51, 52, 53, 54, 55, 56, 57, 58, 59, 60, 61, 62, 63, 64, 65, 66, 67, 68, 69, 70, 71, 72, 73, 74, 75, 76, 77, 78, 79, 80, 81, 82, 83, 84, 85, 86, 87, 88, 89, 90, 91, 92, 93, 94, 95, 96, 97, 98, 99, 100, 101, 102, 103, 104, 105, 106, 107, 108, 109, 110, 111, 112, 113, 114, 115, 116, 117, 577, 579, 581, 583, 585, 587, 589, 591, 593, 595, 597, 599, 601, 603, 605, 607, 609, 611, 613, 615, 617, 619, 621, 623, 625, or 627, a variant, derivative, orthologue, paralogue or homologue thereof, in which:

[1278] the amino acid at Mutated site 4 is Pro, and the amino acid at Mutated site 5 is Ala.

[1279] In another preferred embodiment, the mutated PPO comprises a sequence of SEQ ID NO: 1, 2, 3, 4, 5, 6, 7, 8, 9, 10, 11, 12, 13, 14, 15, 16, 17, 18, 19, 20, 21, 22, 23, 24, 25, 26, 27, 28, 29, 30, 31, 32, 33, 34, 35, 36, 37, 38, 39, 40, 41, 42, 43, 44, 45, 46, 47, 48, 49, 50, 51, 52, 53, 54, 55, 56, 57, 58, 59, 60, 61, 62, 63, 64, 65, 66, 67, 68, 69, 70, 71, 72, 73, 74, 75, 76, 77, 78, 79, 80, 81, 82, 83, 84, 85, 86, 87, 88, 89, 90, 91, 92, 93, 94, 95, 96, 97, 98, 99, 100, 101, 102, 103, 104, 105, 106, 107, 108, 109, 110, 111, 112, 113, 114, 115, 116, 117, 577, 579, 581, 583, 585, 587, 589, 591, 593, 595, 597, 599, 601, 603, 605, 607, 609, 611, 613, 615, 617, 619, 621, 623, 625, or 627, a variant, derivative, orthologue, paralogue or homologue thereof, in which:

[1280] the amino acid at Mutated site 4 is Pro, and the amino acid at Mutated site 5 is Leu.

[1281] In another preferred embodiment, the mutated PPO comprises a sequence of SEQ ID NO: 1, 2, 3, 4, 5, 6, 7, 8, 9, 10, 11, 12, 13, 14, 15, 16, 17, 18, 19, 20, 21, 22, 23, 24, 25, 26, 27, 28, 29, 30, 31, 32, 33, 34, 35, 36, 37, 38, 39, 40, 41, 42, 43, 44, 45, 46, 47, 48, 49, 50, 51, 52, 53, 54, 55, 56, 57, 58, 59, 60, 61, 62, 63, 64, 65, 66, 67, 68, 69, 70, 71, 72, 73, 74, 75, 76, 77, 78, 79, 80, 81, 82, 83, 84, 85, 86, 87, 88, 89, 90, 91, 92, 93, 94, 95, 96, 97, 98, 99, 100, 101, 102, 103, 104, 105, 106, 107, 108, 109, 110, 111, 112, 113, 114, 115, 116, 117, 577, 579, 581, 583, 585, 587, 589, 591, 593, 595, 597, 599, 601, 603, 605, 607, 609, 611, 613, 615, 617, 619, 621, 623, 625, or 627, a variant, derivative, orthologue, paralogue or homologue thereof, in which:

[1282] the amino acid at Mutated site 4 is Pro, and the amino acid at Mutated site 5 is Val.

[1283] In another preferred embodiment, the mutated PPO comprises a sequence of SEQ ID NO: 1, 2, 3, 4, 5, 6, 7, 8, 9, 10, 11, 12, 13, 14, 15, 16, 17, 18, 19, 20, 21, 22, 23, 24, 25, 26, 27, 28, 29, 30, 31, 32, 33, 34, 35, 36, 37, 38, 39, 40, 41, 42, 43, 44, 45, 46, 47, 48, 49, 50, 51, 52, 53, 54, 55, 56, 57, 58, 59, 60, 61, 62, 63, 64, 65, 66, 67, 68, 69, 70, 71, 72, 73, 74, 75, 76, 77, 78, 79, 80, 81, 82, 83, 84, 85, 86, 87, 88, 89, 90, 91, 92, 93, 94, 95, 96, 97, 98, 99, 100, 101, 102, 103, 104, 105, 106, 107, 108, 109, 110, 111, 112, 113, 114, 115, 116, 117, 577, 579, 581, 583, 585, 587, 589, 591, 593, 595, 597, 599, 601, 603, 605, 607, 609, 611, 613, 615, 617, 619, 621, 623, 625, or 627, a variant, derivative, orthologue, paralogue or homologue thereof, in which:

[1284] the amino acid at Mutated site 4 is Pro, and the amino acid at Mutated site 5 is Ile.

[1285] In another preferred embodiment, the mutated PPO comprises a sequence of SEQ ID NO: 1, 2, 3, 4, 5, 6, 7, 8, 9, 10, 11, 12, 13, 14, 15, 16, 17, 18, 19, 20, 21, 22, 23, 24, 25, 26, 27, 28, 29, 30, 31, 32, 33, 34, 35, 36, 37, 38, 39, 40, 41, 42, 43, 44, 45, 46, 47, 48, 49, 50, 51, 52, 53, 54, 55, 56, 57, 58, 59, 60, 61, 62, 63, 64, 65, 66, 67, 68, 69, 70, 71, 72, 73, 74, 75, 76, 77, 78, 79, 80, 81, 82, 83, 84, 85, 86, 87, 88, 89, 90, 91, 92, 93, 94, 95, 96, 97, 98, 99, 100, 101, 102, 103, 104, 105, 106, 107, 108, 109, 110, 111, 112, 113, 114, 115, 116, 117, 577, 579, 581, 583, 585, 587, 589, 591, 593, 595, 597, 599, 601, 603, 605, 607, 609, 611, 613, 615, 617, 619, 621, 623, 625, or 627, a variant, derivative, orthologue, paralogue or homologue thereof, in which:

[1286] the amino acid at Mutated site 4 is Pro, and the amino acid at Mutated site 5 is Met.

[1287] In another preferred embodiment, the mutated PPO comprises a sequence of SEQ ID NO: 1, 2, 3, 4, 5, 6, 7, 8, 9, 10, 11, 12, 13, 14, 15, 16, 17, 18, 19, 20, 21, 22, 23, 24, 25, 26, 27, 28, 29, 30, 31, 32, 33, 34, 35, 36, 37, 38, 39, 40, 41, 42, 43, 44, 45, 46, 47, 48, 49, 50, 51, 52, 53, 54, 55, 56, 57, 58, 59, 60, 61, 62, 63, 64, 65, 66, 67, 68, 69, 70, 71, 72, 73, 74, 75, 76, 77, 78, 79, 80, 81, 82, 83, 84, 85, 86, 87, 88, 89, 90, 91, 92, 93, 94, 95, 96, 97, 98, 99, 100, 101, 102, 103, 104, 105, 106, 107, 108, 109, 110, 111, 112, 113, 114, 115, 116, 117, 577, 579, 581, 583, 585, 587, 589, 591, 593, 595, 597, 599, 601, 603, 605, 607, 609, 611, 613, 615, 617, 619, 621, 623, 625, or 627, a variant, derivative, orthologue, paralogue or homologue thereof, in which:

[1288] the amino acid at Mutated site 4 is Pro, and the amino acid at Mutated site 5 is His.

[1289] In another preferred embodiment, the mutated PPO comprises a sequence of SEQ ID NO: 1, 2, 3, 4, 5, 6, 7, 8, 9, 10, 11, 12, 13, 14, 15, 16, 17, 18, 19, 20, 21, 22, 23, 24, 25, 26, 27, 28, 29, 30, 31, 32, 33, 34, 35, 36, 37, 38, 39, 40, 41, 42, 43, 44, 45, 46, 47, 48, 49, 50, 51, 52, 53, 54, 55, 56, 57, 58, 59, 60, 61, 62, 63, 64, 65, 66, 67, 68, 69, 70, 71, 72, 73, 74, 75, 76, 77, 78, 79, 80, 81, 82, 83, 84, 85, 86, 87, 88, 89, 90, 91, 92, 93, 94, 95, 96, 97, 98, 99, 100, 101, 102, 103, 104, 105, 106, 107, 108, 109, 110, 111, 112, 113, 114, 115, 116, 117, 577, 579, 581, 583, 585, 587, 589, 591, 593, 595, 597, 599, 601, 603, 605, 607, 609, 611, 613, 615, 617, 619, 621, 623, 625, or 627, a variant, derivative, orthologue, paralogue or homologue thereof, in which:

[1290] the amino acid at Mutated site 4 is Pro, and the amino acid at Mutated site 5 is Lys.

[1291] In another preferred embodiment, the mutated PPO comprises a sequence of SEQ ID NO: 1, 2, 3, 4, 5, 6, 7, 8, 9, 10, 11, 12, 13, 14, 15, 16, 17, 18, 19, 20, 21, 22, 23, 24, 25, 26, 27, 28, 29, 30, 31, 32, 33, 34, 35, 36, 37, 38, 39, 40, 41, 42, 43, 44, 45, 46, 47, 48, 49, 50, 51, 52, 53, 54, 55, 56, 57, 58, 59, 60, 61, 62, 63, 64, 65, 66, 67, 68, 69, 70, 71, 72, 73, 74, 75, 76, 77, 78, 79, 80, 81, 82, 83, 84, 85, 86, 87, 88, 89, 90, 91, 92, 93, 94, 95, 96, 97, 98, 99, 100, 101, 102, 103, 104, 105, 106, 107, 108, 109, 110, 111, 112, 113, 114, 115, 116, 117, 577, 579, 581, 583, 585, 587, 589, 591, 593, 595, 597, 599, 601, 603, 605, 607, 609, 611, 613, 615, 617, 619, 621, 623, 625, or 627, a variant, derivative, orthologue, paralogue or homologue thereof, in which:

[1292] the amino acid at Mutated site 4 is Pro, and the amino acid at Mutated site 5 is Asp.

[1293] In another preferred embodiment, the mutated PPO comprises a sequence of SEQ ID NO: 1, 2, 3, 4, 5, 6, 7, 8, 9, 10, 11, 12, 13, 14, 15, 16, 17, 18, 19, 20, 21, 22, 23, 24, 25, 26, 27, 28, 29, 30, 31, 32, 33, 34, 35, 36, 37, 38, 39, 40, 41, 42, 43, 44, 45, 46, 47, 48, 49, 50, 51, 52, 53, 54, 55, 56, 57, 58, 59, 60, 61, 62, 63, 64, 65, 66, 67, 68, 69, 70, 71, 72, 73, 74, 75, 76, 77, 78, 79, 80, 81, 82, 83, 84, 85, 86, 87, 88, 89, 90, 91, 92, 93, 94, 95, 96, 97, 98, 99, 100, 101, 102, 103, 104, 105, 106, 107, 108, 109, 110, 111, 112, 113, 114, 115, 116, 117, 577, 579, 581, 583, 585, 587, 589, 591, 593, 595, 597, 599, 601, 603, 605, 607, 609, 611, 613, 615, 617, 619, 621, 623, 625, or 627, a variant, derivative, orthologue, paralogue or homologue thereof, in which:

[1294] the amino acid at Mutated site 4 is Pro, and the amino acid at Mutated site 5 is Glu.

[1295] In another preferred embodiment, the mutated PPO comprises a sequence of SEQ ID NO: 1, 2, 3, 4, 5, 6, 7, 8, 9, 10, 11, 12, 13, 14, 15, 16, 17, 18, 19, 20, 21, 22, 23, 24, 25, 26, 27, 28, 29, 30, 31, 32, 33, 34, 35, 36, 37, 38, 39, 40, 41, 42, 43, 44, 45, 46, 47, 48, 49, 50, 51, 52, 53, 54, 55, 56, 57, 58, 59, 60, 61, 62, 63, 64, 65, 66, 67, 68, 69, 70, 71, 72, 73, 74, 75, 76, 77, 78, 79, 80, 81, 82, 83, 84, 85, 86, 87, 88, 89, 90, 91, 92, 93, 94, 95, 96, 97, 98, 99, 100, 101, 102, 103, 104, 105, 106, 107, 108, 109, 110, 111, 112, 113, 114, 115, 116, 117, 577, 579, 581, 583, 585, 587, 589, 591, 593, 595, 597, 599, 601, 603, 605, 607, 609, 611, 613, 615, 617, 619, 621, 623, 625, or 627, a variant, derivative, orthologue, paralogue or homologue thereof, in which:

[1296] the amino acid at Mutated site 4 is Pro, and the amino acid at Mutated site 5 is Ser.

[1297] In another preferred embodiment, the mutated PPO comprises a sequence of SEQ ID NO: 1, 2, 3, 4, 5, 6, 7, 8, 9, 10, 11, 12, 13, 14, 15, 16, 17, 18, 19, 20, 21, 22, 23, 24, 25, 26, 27, 28, 29, 30, 31, 32, 33, 34, 35, 36, 37, 38, 39, 40, 41, 42, 43, 44, 45, 46, 47, 48, 49, 50, 51, 52, 53, 54, 55, 56, 57, 58, 59, 60, 61, 62, 63, 64, 65, 66, 67, 68, 69, 70, 71, 72, 73, 74, 75, 76, 77, 78, 79, 80, 81, 82, 83, 84, 85, 86, 87, 88, 89, 90, 91, 92, 93, 94, 95, 96, 97, 98, 99, 100, 101, 102, 103, 104, 105, 106, 107, 108, 109, 110, 111, 112, 113, 114, 115, 116, 117, 577, 579, 581, 583, 585, 587, 589, 591, 593, 595, 597, 599, 601, 603, 605, 607, 609, 611, 613, 615, 617, 619, 621, 623, 625, or 627, a variant, derivative, orthologue, paralogue or homologue thereof, in which:

[1298] the amino acid at Mutated site 4 is Pro, and the amino acid at Mutated site 5 is Thr.

[1299] In another preferred embodiment, the mutated PPO comprises a sequence of SEQ ID NO: 1, 2, 3, 4, 5, 6, 7, 8, 9, 10, 11, 12, 13, 14, 15, 16, 17, 18, 19, 20, 21, 22, 23, 24, 25, 26, 27, 28, 29, 30, 31, 32, 33, 34, 35, 36, 37, 38, 39, 40, 41, 42, 43, 44, 45, 46, 47, 48, 49, 50, 51, 52, 53, 54, 55, 56, 57, 58, 59, 60, 61, 62, 63, 64, 65, 66, 67, 68, 69, 70, 71, 72, 73, 74, 75, 76, 77, 78, 79, 80, 81, 82, 83, 84, 85, 86, 87, 88, 89, 90, 91, 92, 93, 94, 95, 96, 97, 98, 99, 100, 101, 102, 103, 104, 105, 106, 107, 108, 109, 110, 111, 112, 113, 114, 115, 116, 117, 577, 579, 581, 583, 585, 587, 589, 591, 593, 595, 597, 599, 601, 603, 605, 607, 609, 611, 613, 615, 617, 619, 621, 623, 625, or 627, a variant, derivative, orthologue, paralogue or homologue thereof, in which:

[1300] the amino acid at Mutated site 4 is Pro, and the amino acid at Mutated site 5 is Asn.

[1301] In another preferred embodiment, the mutated PPO comprises a sequence of SEQ ID NO: 1, 2, 3, 4, 5, 6, 7, 8, 9, 10, 11, 12, 13, 14, 15, 16, 17, 18, 19, 20, 21, 22, 23, 24, 25, 26, 27, 28, 29, 30, 31, 32, 33, 34, 35, 36, 37, 38, 39, 40, 41, 42, 43, 44, 45, 46, 47, 48, 49, 50, 51, 52, 53, 54, 55, 56, 57, 58, 59, 60, 61, 62, 63, 64, 65, 66, 67, 68, 69, 70, 71, 72, 73, 74, 75, 76, 77, 78, 79, 80, 81, 82, 83, 84, 85, 86, 87, 88, 89, 90, 91, 92, 93, 94, 95, 96, 97, 98, 99, 100, 101, 102, 103, 104, 105, 106, 107, 108, 109, 110, 111, 112, 113, 114, 115, 116, 117, 577, 579, 581, 583, 585, 587, 589, 591, 593, 595, 597, 599, 601, 603, 605, 607, 609, 611, 613, 615, 617, 619, 621, 623, 625, or 627, a variant, derivative, orthologue, paralogue or homologue thereof, in which:

[1302] the amino acid at Mutated site 4 is Pro, and the amino acid at Mutated site 5 is Gln.

[1303] In another preferred embodiment, the mutated PPO comprises a sequence of SEQ ID NO: 1, 2, 3, 4, 5, 6, 7, 8, 9, 10, 11, 12, 13, 14, 15, 16, 17, 18, 19, 20, 21, 22, 23, 24, 25, 26, 27, 28, 29, 30, 31, 32, 33, 34, 35, 36, 37, 38, 39, 40, 41, 42, 43, 44, 45, 46, 47, 48, 49, 50, 51, 52, 53, 54, 55, 56, 57, 58, 59, 60, 61, 62, 63, 64, 65, 66, 67, 68, 69, 70, 71, 72, 73, 74, 75, 76, 77, 78, 79, 80, 81, 82, 83, 84, 85, 86, 87, 88, 89, 90, 91, 92, 93, 94, 95, 96, 97, 98, 99, 100, 101, 102, 103, 104, 105, 106, 107, 108, 109, 110, 111, 112, 113, 114, 115, 116, 117, 577, 579, 581, 583, 585, 587, 589, 591, 593, 595, 597, 599, 601, 603, 605, 607, 609, 611, 613, 615, 617, 619, 621, 623, 625, or 627, a variant, derivative, orthologue, paralogue or homologue thereof, in which:

[1304] the amino acid at Mutated site 4 is Pro, and the amino acid at Mutated site 5 is Cys.

[1305] In another preferred embodiment, the mutated PPO comprises a sequence of SEQ ID NO: 1, 2, 3, 4, 5, 6, 7, 8, 9, 10, 11, 12, 13, 14, 15, 16, 17, 18, 19, 20, 21, 22, 23, 24, 25, 26, 27, 28, 29, 30, 31, 32, 33, 34, 35, 36, 37, 38, 39, 40, 41, 42, 43, 44, 45, 46, 47, 48, 49, 50, 51, 52, 53, 54, 55, 56, 57, 58, 59, 60, 61, 62, 63, 64, 65, 66, 67, 68, 69, 70, 71, 72, 73, 74, 75, 76, 77, 78, 79, 80, 81, 82, 83, 84, 85, 86, 87, 88, 89, 90, 91, 92, 93, 94, 95, 96, 97, 98, 99, 100, 101, 102, 103, 104, 105, 106, 107, 108, 109, 110, 111, 112, 113, 114, 115, 116, 117, 577, 579, 581, 583, 585, 587, 589, 591, 593, 595, 597, 599, 601, 603, 605, 607, 609, 611, 613, 615, 617, 619, 621, 623, 625, or 627, a variant, derivative, orthologue, paralogue or homologue thereof, in which:

[1306] the amino acid at Mutated site 4 is Pro, and the amino acid at Mutated site 5 is Gly.

[1307] In another preferred embodiment, the mutated PPO comprises a sequence of SEQ ID NO: 1, 2, 3, 4, 5, 6, 7, 8, 9, 10, 11, 12, 13, 14, 15, 16, 17, 18, 19, 20, 21, 22, 23, 24, 25, 26, 27, 28, 29, 30, 31, 32, 33, 34, 35, 36, 37, 38, 39, 40, 41, 42, 43, 44, 45, 46, 47, 48, 49, 50, 51, 52, 53, 54, 55, 56, 57, 58, 59, 60, 61, 62, 63, 64, 65, 66, 67, 68, 69, 70, 71, 72, 73, 74, 75, 76, 77, 78, 79, 80, 81, 82, 83, 84, 85, 86, 87, 88, 89, 90, 91, 92, 93, 94, 95, 96, 97, 98, 99, 100, 101, 102, 103, 104, 105, 106, 107, 108, 109, 110, 111, 112, 113, 114, 115, 116, 117, 577, 579, 581, 583, 585, 587, 589, 591, 593, 595, 597, 599, 601, 603, 605, 607, 609, 611, 613, 615, 617, 619, 621, 623, 625, or 627, a variant, derivative, orthologue, paralogue or homologue thereof, in which:

[1308] the amino acid at Mutated site 4 is Pro, and the amino acid at Mutated site 5 is Pro.

[1309] In another preferred embodiment, the mutated PPO comprises a sequence of SEQ ID NO: 1, 2, 3, 4, 5, 6, 7, 8, 9, 10, 11, 12, 13, 14, 15, 16, 17, 18, 19, 20, 21, 22, 23, 24, 25, 26, 27, 28, 29, 30, 31, 32, 33, 34, 35, 36, 37, 38, 39, 40, 41, 42, 43, 44, 45, 46, 47, 48, 49, 50, 51, 52, 53, 54, 55, 56, 57, 58, 59, 60, 61, 62, 63, 64, 65, 66, 67, 68, 69, 70, 71, 72, 73, 74, 75, 76, 77, 78, 79, 80, 81, 82, 83, 84, 85, 86, 87, 88, 89, 90, 91, 92, 93, 94, 95, 96, 97, 98, 99, 100, 101, 102, 103, 104, 105, 106, 107, 108, 109, 110, 111, 112, 113, 114, 115, 116, 117, 577, 579, 581, 583, 585, 587, 589, 591, 593, 595, 597, 599, 601, 603, 605, 607, 609, 611, 613, 615, 617, 619, 621, 623, 625, or 627, a variant, derivative, orthologue, paralogue or homologue thereof, in which:

[1310] the amino acid at Mutated site 4 is Pro, and the amino acid at Mutated site 5 is Arg.

[1311] In another preferred embodiment, the mutated PPO comprises a sequence of SEQ ID NO: 1, 2, 3, 4, 5, 6, 7, 8, 9, 10, 11, 12, 13, 14, 15, 16, 17, 18, 19, 20, 21, 22, 23, 24, 25, 26, 27, 28, 29, 30, 31, 32, 33, 34, 35, 36, 37, 38, 39, 40, 41, 42, 43, 44, 45, 46, 47, 48, 49, 50, 51, 52, 53, 54, 55, 56, 57, 58, 59, 60, 61, 62, 63, 64, 65, 66, 67, 68, 69, 70, 71, 72, 73, 74, 75, 76, 77, 78, 79, 80, 81, 82, 83, 84, 85, 86, 87, 88, 89, 90, 91, 92, 93, 94, 95, 96, 97, 98, 99, 100, 101, 102, 103, 104, 105, 106, 107, 108, 109, 110, 111, 112, 113, 114, 115, 116, 117, 577, 579, 581, 583, 585, 587, 589, 591, 593, 595, 597, 599, 601, 603, 605, 607, 609, 611, 613, 615, 617, 619, 621, 623, 625, or 627, a variant, derivative, orthologue, paralogue or homologue thereof, in which:

[1312] the amino acid at Mutated site 4 is Pro, and the amino acid at Mutated site 5 is Tyr.

[1313] In another preferred embodiment, the mutated PPO comprises a sequence of SEQ ID NO: 1, 2, 3, 4, 5, 6, 7, 8, 9, 10, 11, 12, 13, 14, 15, 16, 17, 18, 19, 20, 21, 22, 23, 24, 25, 26, 27, 28, 29, 30, 31, 32, 33, 34, 35, 36, 37, 38, 39, 40, 41, 42, 43, 44, 45, 46, 47, 48, 49, 50, 51, 52, 53, 54, 55, 56, 57, 58, 59, 60, 61, 62, 63, 64, 65, 66, 67, 68, 69, 70, 71, 72, 73, 74, 75, 76, 77, 78, 79, 80, 81, 82, 83, 84, 85, 86, 87, 88, 89, 90, 91, 92, 93, 94, 95, 96, 97, 98, 99, 100, 101, 102, 103, 104, 105, 106, 107, 108, 109, 110, 111, 112, 113, 114, 115, 116, 117, 577, 579, 581, 583, 585, 587, 589, 591, 593, 595, 597, 599, 601, 603, 605, 607, 609, 611, 613, 615, 617, 619, 621, 623, 625, or 627, a variant, derivative, orthologue, paralogue or homologue thereof, in which:

[1314] the amino acid at Mutated site 4 is Pro, and the amino acid at Mutated site 5 is Trp.

[1315] In another preferred embodiment, the mutated PPO comprises a sequence of SEQ ID NO: 1, 2, 3, 4, 5, 6, 7, 8, 9, 10, 11, 12, 13, 14, 15, 16, 17, 18, 19, 20, 21, 22, 23, 24, 25, 26, 27, 28, 29, 30, 31, 32, 33, 34, 35, 36, 37, 38, 39, 40, 41, 42, 43, 44, 45, 46, 47, 48, 49, 50, 51, 52, 53, 54, 55, 56, 57, 58, 59, 60, 61, 62, 63, 64, 65, 66, 67, 68, 69, 70, 71, 72, 73, 74, 75, 76, 77, 78, 79, 80, 81, 82, 83, 84, 85, 86, 87, 88, 89, 90, 91, 92, 93, 94, 95, 96, 97, 98, 99, 100, 101, 102, 103, 104, 105, 106, 107, 108, 109, 110, 111, 112, 113, 114, 115, 116, 117, 577, 579, 581, 583, 585, 587, 589, 591, 593, 595, 597, 599, 601, 603, 605, 607, 609, 611, 613, 615, 617, 619, 621, 623, 625, or 627, a variant, derivative, orthologue, paralogue or homologue thereof, in which:

[1316] the amino acid at Mutated site 4 is Phe, and the amino acid at Mutated site 5 is Ala.

[1317] In another preferred embodiment, the mutated PPO comprises a sequence of SEQ ID NO: 1, 2, 3, 4, 5, 6, 7, 8, 9, 10, 11, 12, 13, 14, 15, 16, 17, 18, 19, 20, 21, 22, 23, 24, 25, 26, 27, 28, 29, 30, 31, 32, 33, 34, 35, 36, 37, 38, 39, 40, 41, 42, 43, 44, 45, 46, 47, 48, 49, 50, 51, 52, 53, 54, 55, 56, 57, 58, 59, 60, 61, 62, 63, 64, 65, 66, 67, 68, 69, 70, 71, 72, 73, 74, 75, 76, 77, 78, 79, 80, 81, 82, 83, 84, 85, 86, 87, 88, 89, 90, 91, 92, 93, 94, 95, 96, 97, 98, 99, 100, 101, 102, 103, 104, 105, 106, 107, 108, 109, 110, 111, 112, 113, 114, 115, 116, 117, 577, 579, 581, 583, 585, 587, 589, 591, 593, 595, 597, 599, 601, 603, 605, 607, 609, 611, 613, 615, 617, 619, 621, 623, 625, or 627, a variant, derivative, orthologue, paralogue or homologue thereof, in which:

[1318] the amino acid at Mutated site 4 is Phe, and the amino acid at Mutated site 5 is Leu.

[1319] In another preferred embodiment, the mutated PPO comprises a sequence of SEQ ID NO: 1, 2, 3, 4, 5, 6, 7, 8, 9, 10, 11, 12, 13, 14, 15, 16, 17, 18, 19, 20, 21, 22, 23, 24, 25, 26, 27, 28, 29, 30, 31, 32, 33, 34, 35, 36, 37, 38, 39, 40, 41, 42, 43, 44, 45, 46, 47, 48, 49, 50, 51, 52, 53, 54, 55, 56, 57, 58, 59, 60, 61, 62, 63, 64, 65, 66, 67, 68, 69, 70, 71, 72, 73, 74, 75, 76, 77, 78, 79, 80, 81, 82, 83, 84, 85, 86, 87, 88, 89, 90, 91, 92, 93, 94, 95, 96, 97, 98, 99, 100, 101, 102, 103, 104, 105, 106, 107, 108, 109, 110, 111, 112, 113, 114, 115, 116, 117, 577, 579, 581, 583, 585, 587, 589, 591, 593, 595, 597, 599, 601, 603, 605, 607, 609, 611, 613, 615, 617, 619, 621, 623, 625, or 627, a variant, derivative, orthologue, paralogue or homologue thereof, in which:

[1320] the amino acid at Mutated site 4 is Phe, and the amino acid at Mutated site 5 is Val.

[1321] In another preferred embodiment, the mutated PPO comprises a sequence of SEQ ID NO: 1, 2, 3, 4, 5, 6, 7, 8, 9, 10, 11, 12, 13, 14, 15, 16, 17, 18, 19, 20, 21, 22, 23, 24, 25, 26, 27, 28, 29, 30, 31, 32, 33, 34, 35, 36, 37, 38, 39, 40, 41, 42, 43, 44, 45, 46, 47, 48, 49, 50, 51, 52, 53, 54, 55, 56, 57, 58, 59, 60, 61, 62, 63, 64, 65, 66, 67, 68, 69, 70, 71, 72, 73, 74, 75, 76, 77, 78, 79, 80, 81, 82, 83, 84, 85, 86, 87, 88, 89, 90, 91, 92, 93, 94, 95, 96, 97, 98, 99, 100, 101, 102, 103, 104, 105, 106, 107, 108, 109, 110, 111, 112, 113, 114, 115, 116, 117, 577, 579, 581, 583, 585, 587, 589, 591, 593, 595, 597, 599, 601, 603, 605, 607, 609, 611, 613, 615, 617, 619, 621, 623, 625, or 627, a variant, derivative, orthologue, paralogue or homologue thereof, in which:

[1322] the amino acid at Mutated site 4 is Phe, and the amino acid at Mutated site 5 is Ile.

[1323] In another preferred embodiment, the mutated PPO comprises a sequence of SEQ ID NO: 1, 2, 3, 4, 5, 6, 7, 8, 9, 10, 11, 12, 13, 14, 15, 16, 17, 18, 19, 20, 21, 22, 23, 24, 25, 26, 27, 28, 29, 30, 31, 32, 33, 34, 35, 36, 37, 38, 39, 40, 41, 42, 43, 44, 45, 46, 47, 48, 49, 50, 51, 52, 53, 54, 55, 56, 57, 58, 59, 60, 61, 62, 63, 64, 65, 66, 67, 68, 69, 70, 71, 72, 73, 74, 75, 76, 77, 78, 79, 80, 81, 82, 83, 84, 85, 86, 87, 88, 89, 90, 91, 92, 93, 94, 95, 96, 97, 98, 99, 100, 101, 102, 103, 104, 105, 106, 107, 108, 109, 110, 111, 112, 113, 114, 115, 116, 117, 577, 579, 581, 583, 585, 587, 589, 591, 593, 595, 597, 599, 601, 603, 605, 607, 609, 611, 613, 615, 617, 619, 621, 623, 625, or 627, a variant, derivative, orthologue, paralogue or homologue thereof, in which:

[1324] the amino acid at Mutated site 4 is Phe, and the amino acid at Mutated site 5 is Met.

[1325] In another preferred embodiment, the mutated PPO comprises a sequence of SEQ ID NO: 1, 2, 3, 4, 5, 6, 7, 8, 9, 10, 11, 12, 13, 14, 15, 16, 17, 18, 19, 20, 21, 22, 23, 24, 25, 26, 27, 28, 29, 30, 31, 32, 33, 34, 35, 36, 37, 38, 39, 40, 41, 42, 43, 44, 45, 46, 47, 48, 49, 50, 51, 52, 53, 54, 55, 56, 57, 58, 59, 60, 61, 62, 63, 64, 65, 66, 67, 68, 69, 70, 71, 72, 73, 74, 75, 76, 77, 78, 79, 80, 81, 82, 83, 84, 85, 86, 87, 88, 89, 90, 91, 92, 93, 94, 95, 96, 97, 98, 99, 100, 101, 102, 103, 104, 105, 106, 107, 108, 109, 110, 111, 112, 113, 114, 115, 116, 117, 577, 579, 581, 583, 585, 587, 589, 591, 593, 595, 597, 599, 601, 603, 605, 607, 609, 611, 613, 615, 617, 619, 621, 623, 625, or 627, a variant, derivative, orthologue, paralogue or homologue thereof, in which:

[1326] the amino acid at Mutated site 4 is Phe, and the amino acid at Mutated site 5 is His.

[1327] In another preferred embodiment, the mutated PPO comprises a sequence of SEQ ID NO: 1, 2, 3, 4, 5, 6, 7, 8, 9, 10, 11, 12, 13, 14, 15, 16, 17, 18, 19, 20, 21, 22, 23, 24, 25, 26, 27, 28, 29, 30, 31, 32, 33, 34, 35, 36, 37, 38, 39, 40, 41, 42, 43, 44, 45, 46, 47, 48, 49, 50, 51, 52, 53, 54, 55, 56, 57, 58, 59, 60, 61, 62, 63, 64, 65, 66, 67, 68, 69, 70, 71, 72, 73, 74, 75, 76, 77, 78, 79, 80, 81, 82, 83, 84, 85, 86, 87, 88, 89, 90, 91, 92, 93, 94, 95, 96, 97, 98, 99, 100, 101, 102, 103, 104, 105, 106, 107, 108, 109, 110, 111, 112, 113, 114, 115, 116, 117, 577, 579, 581, 583, 585, 587, 589, 591, 593, 595, 597, 599, 601, 603, 605, 607, 609, 611, 613, 615, 617, 619, 621, 623, 625, or 627, a variant, derivative, orthologue, paralogue or homologue thereof, in which:

[1328] the amino acid at Mutated site 4 is Phe, and the amino acid at Mutated site 5 is Lys.

[1329] In another preferred embodiment, the mutated PPO comprises a sequence of SEQ ID NO: 1, 2, 3, 4, 5, 6, 7, 8, 9, 10, 11, 12, 13, 14, 15, 16, 17, 18, 19, 20, 21, 22, 23, 24, 25, 26, 27, 28, 29, 30, 31, 32, 33, 34, 35, 36, 37, 38, 39, 40, 41, 42, 43, 44, 45, 46, 47, 48, 49, 50, 51, 52, 53, 54, 55, 56, 57, 58, 59, 60, 61, 62, 63, 64, 65, 66, 67, 68, 69, 70, 71, 72, 73, 74, 75, 76, 77, 78, 79, 80, 81, 82, 83, 84, 85, 86, 87, 88, 89, 90, 91, 92, 93, 94, 95, 96, 97, 98, 99, 100, 101, 102, 103, 104, 105, 106, 107, 108, 109, 110, 111, 112, 113, 114, 115, 116, 117, 577, 579, 581, 583, 585, 587, 589, 591, 593, 595, 597, 599, 601, 603, 605, 607, 609, 611, 613, 615, 617, 619, 621, 623, 625, or 627, a variant, derivative, orthologue, paralogue or homologue thereof, in which:

[1330] the amino acid at Mutated site 4 is Phe, and the amino acid at Mutated site 5 is Asp.

[1331] In another preferred embodiment, the mutated PPO comprises a sequence of SEQ ID NO: 1, 2, 3, 4, 5, 6, 7, 8, 9, 10, 11, 12, 13, 14, 15, 16, 17, 18, 19, 20, 21, 22, 23, 24, 25, 26, 27, 28, 29, 30, 31, 32, 33, 34, 35, 36, 37, 38, 39, 40, 41, 42, 43, 44, 45, 46, 47, 48, 49, 50, 51, 52, 53, 54, 55, 56, 57, 58, 59, 60, 61, 62, 63, 64, 65, 66, 67, 68, 69, 70, 71, 72, 73, 74, 75, 76, 77, 78, 79, 80, 81, 82, 83, 84, 85, 86, 87, 88, 89, 90, 91, 92, 93, 94, 95, 96, 97, 98, 99, 100, 101, 102, 103, 104, 105, 106, 107, 108, 109, 110, 111, 112, 113, 114, 115, 116, 117, 577, 579, 581, 583, 585, 587, 589, 591, 593, 595, 597, 599, 601, 603, 605, 607, 609, 611, 613, 615, 617, 619, 621, 623, 625, or 627, a variant, derivative, orthologue, paralogue or homologue thereof, in which:

[1332] the amino acid at Mutated site 4 is Phe, and the amino acid at Mutated site 5 is Glu.

[1333] In another preferred embodiment, the mutated PPO comprises a sequence of SEQ ID NO: 1, 2, 3, 4, 5, 6, 7, 8, 9, 10, 11, 12, 13, 14, 15, 16, 17, 18, 19, 20, 21, 22, 23, 24, 25, 26, 27, 28, 29, 30, 31, 32, 33, 34, 35, 36, 37, 38, 39, 40, 41, 42, 43, 44, 45, 46, 47, 48, 49, 50, 51, 52, 53, 54, 55, 56, 57, 58, 59, 60, 61, 62, 63, 64, 65, 66, 67, 68, 69, 70, 71, 72, 73, 74, 75, 76, 77, 78, 79, 80, 81, 82, 83, 84, 85, 86, 87, 88, 89, 90, 91, 92, 93, 94, 95, 96, 97, 98, 99, 100, 101, 102, 103, 104, 105, 106, 107, 108, 109, 110, 111, 112, 113, 114, 115, 116, 117, 577, 579, 581, 583, 585, 587, 589, 591, 593, 595, 597, 599, 601, 603, 605, 607, 609, 611, 613, 615, 617, 619, 621, 623, 625, or 627, a variant, derivative, orthologue, paralogue or homologue thereof, in which:

[1334] the amino acid at Mutated site 4 is Phe, and the amino acid at Mutated site 5 is Ser.

[1335] In another preferred embodiment, the mutated PPO comprises a sequence of SEQ ID NO: 1, 2, 3, 4, 5, 6, 7, 8, 9, 10, 11, 12, 13, 14, 15, 16, 17, 18, 19, 20, 21, 22, 23, 24, 25, 26, 27, 28, 29, 30, 31, 32, 33, 34, 35, 36, 37, 38, 39, 40, 41, 42, 43, 44, 45, 46, 47, 48, 49, 50, 51, 52, 53, 54, 55, 56, 57, 58, 59, 60, 61, 62, 63, 64, 65, 66, 67, 68, 69, 70, 71, 72, 73, 74, 75, 76, 77, 78, 79, 80, 81, 82, 83, 84, 85, 86, 87, 88, 89, 90, 91, 92, 93, 94, 95, 96, 97, 98, 99, 100, 101, 102, 103, 104, 105, 106, 107, 108, 109, 110, 111, 112, 113, 114, 115, 116, 117, 577, 579, 581, 583, 585, 587, 589, 591, 593, 595, 597, 599, 601, 603, 605, 607, 609, 611, 613, 615, 617, 619, 621, 623, 625, or 627, a variant, derivative, orthologue, paralogue or homologue thereof, in which:

[1336] the amino acid at Mutated site 4 is Phe, and the amino acid at Mutated site 5 is Thr.

[1337] In another preferred embodiment, the mutated PPO comprises a sequence of SEQ ID NO: 1, 2, 3, 4, 5, 6, 7, 8, 9, 10, 11, 12, 13, 14, 15, 16, 17, 18, 19, 20, 21, 22, 23, 24, 25, 26, 27, 28, 29, 30, 31, 32, 33, 34, 35, 36, 37, 38, 39, 40, 41, 42, 43, 44, 45, 46, 47, 48, 49, 50, 51, 52, 53, 54, 55, 56, 57, 58, 59, 60, 61, 62, 63, 64, 65, 66, 67, 68, 69, 70, 71, 72, 73, 74, 75, 76, 77, 78, 79, 80, 81, 82, 83, 84, 85, 86, 87, 88, 89, 90, 91, 92, 93, 94, 95, 96, 97, 98, 99, 100, 101, 102, 103, 104, 105, 106, 107, 108, 109, 110, 111, 112, 113, 114, 115, 116, 117, 577, 579, 581, 583, 585, 587, 589, 591, 593, 595, 597, 599, 601, 603, 605, 607, 609, 611, 613, 615, 617, 619, 621, 623, 625, or 627, a variant, derivative, orthologue, paralogue or homologue thereof, in which:

[1338] the amino acid at Mutated site 4 is Phe, and the amino acid at Mutated site 5 is Asn.

[1339] In another preferred embodiment, the mutated PPO comprises a sequence of SEQ ID NO: 1, 2, 3, 4, 5, 6, 7, 8, 9, 10, 11, 12, 13, 14, 15, 16, 17, 18, 19, 20, 21, 22, 23, 24, 25, 26, 27, 28, 29, 30, 31, 32, 33, 34, 35, 36, 37, 38, 39, 40, 41, 42, 43, 44, 45, 46, 47, 48, 49, 50, 51, 52, 53, 54, 55, 56, 57, 58, 59, 60, 61, 62, 63, 64, 65, 66, 67, 68, 69, 70, 71, 72, 73, 74, 75, 76, 77, 78, 79, 80, 81, 82, 83, 84, 85, 86, 87, 88, 89, 90, 91, 92, 93, 94, 95, 96, 97, 98, 99, 100, 101, 102, 103, 104, 105, 106, 107, 108, 109, 110, 111, 112, 113, 114, 115, 116, 117, 577, 579, 581, 583, 585, 587, 589, 591, 593, 595, 597, 599, 601, 603, 605, 607, 609, 611, 613, 615, 617, 619, 621, 623, 625, or 627, a variant, derivative, orthologue, paralogue or homologue thereof, in which:

[1340] the amino acid at Mutated site 4 is Phe, and the amino acid at Mutated site 5 is Gln.

[1341] In another preferred embodiment, the mutated PPO comprises a sequence of SEQ ID NO: 1, 2, 3, 4, 5, 6, 7, 8, 9, 10, 11, 12, 13, 14, 15, 16, 17, 18, 19, 20, 21, 22, 23, 24, 25, 26, 27, 28, 29, 30, 31, 32, 33, 34, 35, 36, 37, 38, 39, 40, 41, 42, 43, 44, 45, 46, 47, 48, 49, 50, 51, 52, 53, 54, 55, 56, 57, 58, 59, 60, 61, 62, 63, 64, 65, 66, 67, 68, 69, 70, 71, 72, 73, 74, 75, 76, 77, 78, 79, 80, 81, 82, 83, 84, 85, 86, 87, 88, 89, 90, 91, 92, 93, 94, 95, 96, 97, 98, 99, 100, 101, 102, 103, 104, 105, 106, 107, 108, 109, 110, 111, 112, 113, 114, 115, 116, 117, 577, 579, 581, 583, 585, 587, 589, 591, 593, 595, 597, 599, 601, 603, 605, 607, 609, 611, 613, 615, 617, 619, 621, 623, 625, or 627, a variant, derivative, orthologue, paralogue or homologue thereof, in which:

[1342] the amino acid at Mutated site 4 is Phe, and the amino acid at Mutated site 5 is Cys.

[1343] In another preferred embodiment, the mutated PPO comprises a sequence of SEQ ID NO: 1, 2, 3, 4, 5, 6, 7, 8, 9, 10, 11, 12, 13, 14, 15, 16, 17, 18, 19, 20, 21, 22, 23, 24, 25, 26, 27, 28, 29, 30, 31, 32, 33, 34, 35, 36, 37, 38, 39, 40, 41, 42, 43, 44, 45, 46, 47, 48, 49, 50, 51, 52, 53, 54, 55, 56, 57, 58, 59, 60, 61, 62, 63, 64, 65, 66, 67, 68, 69, 70, 71, 72, 73, 74, 75, 76, 77, 78, 79, 80, 81, 82, 83, 84, 85, 86, 87, 88, 89, 90, 91, 92, 93, 94, 95, 96, 97, 98, 99, 100, 101, 102, 103, 104, 105, 106, 107, 108, 109, 110, 111, 112, 113, 114, 115, 116, 117, 577, 579, 581, 583, 585, 587, 589, 591, 593, 595, 597, 599, 601, 603, 605, 607, 609, 611, 613, 615, 617, 619, 621, 623, 625, or 627, a variant, derivative, orthologue, paralogue or homologue thereof, in which:

[1344] the amino acid at Mutated site 4 is Phe, and the amino acid at Mutated site 5 is Gly.

[1345] In another preferred embodiment, the mutated PPO comprises a sequence of SEQ ID NO: 1, 2, 3, 4, 5, 6, 7, 8, 9, 10, 11, 12, 13, 14, 15, 16, 17, 18, 19, 20, 21, 22, 23, 24, 25, 26, 27, 28, 29, 30, 31, 32, 33, 34, 35, 36, 37, 38, 39, 40, 41, 42, 43, 44, 45, 46, 47, 48, 49, 50, 51, 52, 53, 54, 55, 56, 57, 58, 59, 60, 61, 62, 63, 64, 65, 66, 67, 68, 69, 70, 71, 72, 73, 74, 75, 76, 77, 78, 79, 80, 81, 82, 83, 84, 85, 86, 87, 88, 89, 90, 91, 92, 93, 94, 95, 96, 97, 98, 99, 100, 101, 102, 103, 104, 105, 106, 107, 108, 109, 110, 111, 112, 113, 114, 115, 116, 117, 577, 579, 581, 583, 585, 587, 589, 591, 593, 595, 597, 599, 601, 603, 605, 607, 609, 611, 613, 615, 617, 619, 621, 623, 625, or 627, a variant, derivative, orthologue, paralogue or homologue thereof, in which:

[1346] the amino acid at Mutated site 4 is Phe, and the amino acid at Mutated site 5 is Pro.

[1347] In another preferred embodiment, the mutated PPO comprises a sequence of SEQ ID NO: 1, 2, 3, 4, 5, 6, 7, 8, 9, 10, 11, 12, 13, 14, 15, 16, 17, 18, 19, 20, 21, 22, 23, 24, 25, 26, 27, 28, 29, 30, 31, 32, 33, 34, 35, 36, 37, 38, 39, 40, 41, 42, 43, 44, 45, 46, 47, 48, 49, 50, 51, 52, 53, 54, 55, 56, 57, 58, 59, 60, 61, 62, 63, 64, 65, 66, 67, 68, 69, 70, 71, 72, 73, 74, 75, 76, 77, 78, 79, 80, 81, 82, 83, 84, 85, 86, 87, 88, 89, 90, 91, 92, 93, 94, 95, 96, 97, 98, 99, 100, 101, 102, 103, 104, 105, 106, 107, 108, 109, 110, 111, 112, 113, 114, 115, 116, 117, 577, 579, 581, 583, 585, 587, 589, 591, 593, 595, 597, 599, 601, 603, 605, 607, 609, 611, 613, 615, 617, 619, 621, 623, 625, or 627, a variant, derivative, orthologue, paralogue or homologue thereof, in which:

[1348] the amino acid at Mutated site 4 is Phe, and the amino acid at Mutated site 5 is Arg.

[1349] In another preferred embodiment, the mutated PPO comprises a sequence of SEQ ID NO: 1, 2, 3, 4, 5, 6, 7, 8, 9, 10, 11, 12, 13, 14, 15, 16, 17, 18, 19, 20, 21, 22, 23, 24, 25, 26, 27, 28, 29, 30, 31, 32, 33, 34, 35, 36, 37, 38, 39, 40, 41, 42, 43, 44, 45, 46, 47, 48, 49, 50, 51, 52, 53, 54, 55, 56, 57, 58, 59, 60, 61, 62, 63, 64, 65, 66, 67, 68, 69, 70, 71, 72, 73, 74, 75, 76, 77, 78, 79, 80, 81, 82, 83, 84, 85, 86, 87, 88, 89, 90, 91, 92, 93, 94, 95, 96, 97, 98, 99, 100, 101, 102, 103, 104, 105, 106, 107, 108, 109, 110, 111, 112, 113, 114, 115, 116, 117, 577, 579, 581, 583, 585, 587, 589, 591, 593, 595, 597, 599, 601, 603, 605, 607, 609, 611, 613, 615, 617, 619, 621, 623, 625, or 627, a variant, derivative, orthologue, paralogue or homologue thereof, in which:

[1350] the amino acid at Mutated site 4 is Phe, and the amino acid at Mutated site 5 is Tyr.

[1351] In another preferred embodiment, the mutated PPO comprises a sequence of SEQ ID NO: 1, 2, 3, 4, 5, 6, 7, 8, 9, 10, 11, 12, 13, 14, 15, 16, 17, 18, 19, 20, 21, 22, 23, 24, 25, 26, 27, 28, 29, 30, 31, 32, 33, 34, 35, 36, 37, 38, 39, 40, 41, 42, 43, 44, 45, 46, 47, 48, 49, 50, 51, 52, 53, 54, 55, 56, 57, 58, 59, 60, 61, 62, 63, 64, 65, 66, 67, 68, 69, 70, 71, 72, 73, 74, 75, 76, 77, 78, 79, 80, 81, 82, 83, 84, 85, 86, 87, 88, 89, 90, 91, 92, 93, 94, 95, 96, 97, 98, 99, 100, 101, 102, 103, 104, 105, 106, 107, 108, 109, 110, 111, 112, 113, 114, 115, 116, 117, 577, 579, 581, 583, 585, 587, 589, 591, 593, 595, 597, 599, 601, 603, 605, 607, 609, 611, 613, 615, 617, 619, 621, 623, 625, or 627, a variant, derivative, orthologue, paralogue or homologue thereof, in which:

[1352] the amino acid at Mutated site 4 is Phe, and the amino acid at Mutated site 5 is Trp.

[1353] In another preferred embodiment, the mutated PPO comprises a sequence of SEQ ID NO: 1, 2, 3, 4, 5, 6, 7, 8, 9, 10, 11, 12, 13, 14, 15, 16, 17, 18, 19, 20, 21, 22, 23, 24, 25, 26, 27, 28, 29, 30, 31, 32, 33, 34, 35, 36, 37, 38, 39, 40, 41, 42, 43, 44, 45, 46, 47, 48, 49, 50, 51, 52, 53, 54, 55, 56, 57, 58, 59, 60, 61, 62, 63, 64, 65, 66, 67, 68, 69, 70, 71, 72, 73, 74, 75, 76, 77, 78, 79, 80, 81, 82, 83, 84, 85, 86, 87, 88, 89, 90, 91, 92, 93, 94, 95, 96, 97, 98, 99, 100, 101, 102, 103, 104, 105, 106, 107, 108, 109, 110, 111, 112, 113, 114, 115, 116, 117, 577, 579, 581, 583, 585, 587, 589, 591, 593, 595, 597, 599, 601, 603, 605, 607, 609, 611, 613, 615, 617, 619, 621, 623, 625, or 627, a variant, derivative, orthologue, paralogue or homologue thereof, in which:

[1354] the amino acid at Mutated site 4 is Tyr, and the amino acid at Mutated site 5 is Ala.

[1355] In another preferred embodiment, the mutated PPO comprises a sequence of SEQ ID NO: 1, 2, 3, 4, 5, 6, 7, 8, 9, 10, 11, 12, 13, 14, 15, 16, 17, 18, 19, 20, 21, 22, 23, 24, 25, 26, 27, 28, 29, 30, 31, 32, 33, 34, 35, 36, 37, 38, 39, 40, 41, 42, 43, 44, 45, 46, 47, 48, 49, 50, 51, 52, 53, 54, 55, 56, 57, 58, 59, 60, 61, 62, 63, 64, 65, 66, 67, 68, 69, 70, 71, 72, 73, 74, 75, 76, 77, 78, 79, 80, 81, 82, 83, 84, 85, 86, 87, 88, 89, 90, 91, 92, 93, 94, 95, 96, 97, 98, 99, 100, 101, 102, 103, 104, 105, 106, 107, 108, 109, 110, 111, 112, 113, 114, 115, 116, 117, 577, 579, 581, 583, 585, 587, 589, 591, 593, 595, 597, 599, 601, 603, 605, 607, 609, 611, 613, 615, 617, 619, 621, 623, 625, or 627, a variant, derivative, orthologue, paralogue or homologue thereof, in which:

[1356] the amino acid at Mutated site 4 is Tyr, and the amino acid at Mutated site 5 is Leu.

[1357] In another preferred embodiment, the mutated PPO comprises a sequence of SEQ ID NO: 1, 2, 3, 4, 5, 6, 7, 8, 9, 10, 11, 12, 13, 14, 15, 16, 17, 18, 19, 20, 21, 22, 23, 24, 25, 26, 27, 28, 29, 30, 31, 32, 33, 34, 35, 36, 37, 38, 39, 40, 41, 42, 43, 44, 45, 46, 47, 48, 49, 50, 51, 52, 53, 54, 55, 56, 57, 58, 59, 60, 61, 62, 63, 64, 65, 66, 67, 68, 69, 70, 71, 72, 73, 74, 75, 76, 77, 78, 79, 80, 81, 82, 83, 84, 85, 86, 87, 88, 89, 90, 91, 92, 93, 94, 95, 96, 97, 98, 99, 100, 101, 102, 103, 104, 105, 106, 107, 108, 109, 110, 111, 112, 113, 114, 115, 116, 117, 577, 579, 581, 583, 585, 587, 589, 591, 593, 595, 597, 599, 601, 603, 605, 607, 609, 611, 613, 615, 617, 619, 621, 623, 625, or 627, a variant, derivative, orthologue, paralogue or homologue thereof, in which:

[1358] the amino acid at Mutated site 4 is Tyr, and the amino acid at Mutated site 5 is Val.

[1359] In another preferred embodiment, the mutated PPO comprises a sequence of SEQ ID NO: 1, 2, 3, 4, 5, 6, 7, 8, 9, 10, 11, 12, 13, 14, 15, 16, 17, 18, 19, 20, 21, 22, 23, 24, 25, 26, 27, 28, 29, 30, 31, 32, 33, 34, 35, 36, 37, 38, 39, 40, 41, 42, 43, 44, 45, 46, 47, 48, 49, 50, 51, 52, 53, 54, 55, 56, 57, 58, 59, 60, 61, 62, 63, 64, 65, 66, 67, 68, 69, 70, 71, 72, 73, 74, 75, 76, 77, 78, 79, 80, 81, 82, 83, 84, 85, 86, 87, 88, 89, 90, 91, 92, 93, 94, 95, 96, 97, 98, 99, 100, 101, 102, 103, 104, 105, 106, 107, 108, 109, 110, 111, 112, 113, 114, 115, 116, 117, 577, 579, 581, 583, 585, 587, 589, 591, 593, 595, 597, 599, 601, 603, 605, 607, 609, 611, 613, 615, 617, 619, 621, 623, 625, or 627, a variant, derivative, orthologue, paralogue or homologue thereof, in which:

[1360] the amino acid at Mutated site 4 is Tyr, and the amino acid at Mutated site 5 is Ile.

[1361] In another preferred embodiment, the mutated PPO comprises a sequence of SEQ ID NO: 1, 2, 3, 4, 5, 6, 7, 8, 9, 10, 11, 12, 13, 14, 15, 16, 17, 18, 19, 20, 21, 22, 23, 24, 25, 26, 27, 28, 29, 30, 31, 32, 33, 34, 35, 36, 37, 38, 39, 40, 41, 42, 43, 44, 45, 46, 47, 48, 49, 50, 51, 52, 53, 54, 55, 56, 57, 58, 59, 60, 61, 62, 63, 64, 65, 66, 67, 68, 69, 70, 71, 72, 73, 74, 75, 76, 77, 78, 79, 80, 81, 82, 83, 84, 85, 86, 87, 88, 89, 90, 91, 92, 93, 94, 95, 96, 97, 98, 99, 100, 101, 102, 103, 104, 105, 106, 107, 108, 109, 110, 111, 112, 113, 114, 115, 116, 117, 577, 579, 581, 583, 585, 587, 589, 591, 593, 595, 597, 599, 601, 603, 605, 607, 609, 611, 613, 615, 617, 619, 621, 623, 625, or 627, a variant, derivative, orthologue, paralogue or homologue thereof, in which:

[1362] the amino acid at Mutated site 4 is Tyr, and the amino acid at Mutated site 5 is Met.

[1363] In another preferred embodiment, the mutated PPO comprises a sequence of SEQ ID NO: 1, 2, 3, 4, 5, 6, 7, 8, 9, 10, 11, 12, 13, 14, 15, 16, 17, 18, 19, 20, 21, 22, 23, 24, 25, 26, 27, 28, 29, 30, 31, 32, 33, 34, 35, 36, 37, 38, 39, 40, 41, 42, 43, 44, 45, 46, 47, 48, 49, 50, 51, 52, 53, 54, 55, 56, 57, 58, 59, 60, 61, 62, 63, 64, 65, 66, 67, 68, 69, 70, 71, 72, 73, 74, 75, 76, 77, 78, 79, 80, 81, 82, 83, 84, 85, 86, 87, 88, 89, 90, 91, 92, 93, 94, 95, 96, 97, 98, 99, 100, 101, 102, 103, 104, 105, 106, 107, 108, 109, 110, 111, 112, 113, 114, 115, 116, 117, 577, 579, 581, 583, 585, 587, 589, 591, 593, 595, 597, 599, 601, 603, 605, 607, 609, 611, 613, 615, 617, 619, 621, 623, 625, or 627, a variant, derivative, orthologue, paralogue or homologue thereof, in which:

[1364] the amino acid at Mutated site 4 is Tyr, and the amino acid at Mutated site 5 is His.

[1365] In another preferred embodiment, the mutated PPO comprises a sequence of SEQ ID NO: 1, 2, 3, 4, 5, 6, 7, 8, 9, 10, 11, 12, 13, 14, 15, 16, 17, 18, 19, 20, 21, 22, 23, 24, 25, 26, 27, 28, 29, 30, 31, 32, 33, 34, 35, 36, 37, 38, 39, 40, 41, 42, 43, 44, 45, 46, 47, 48, 49, 50, 51, 52, 53, 54, 55, 56, 57, 58, 59, 60, 61, 62, 63, 64, 65, 66, 67, 68, 69, 70, 71, 72, 73, 74, 75, 76, 77, 78, 79, 80, 81, 82, 83, 84, 85, 86, 87, 88, 89, 90, 91, 92, 93, 94, 95, 96, 97, 98, 99, 100, 101, 102, 103, 104, 105, 106, 107, 108, 109, 110, 111, 112, 113, 114, 115, 116, 117, 577, 579, 581, 583, 585, 587, 589, 591, 593, 595, 597, 599, 601, 603, 605, 607, 609, 611, 613, 615, 617, 619, 621, 623, 625, or 627, a variant, derivative, orthologue, paralogue or homologue thereof, in which:

[1366] the amino acid at Mutated site 4 is Tyr, and the amino acid at Mutated site 5 is Lys.

[1367] In another preferred embodiment, the mutated PPO comprises a sequence of SEQ ID NO: 1, 2, 3, 4, 5, 6, 7, 8, 9, 10, 11, 12, 13, 14, 15, 16, 17, 18, 19, 20, 21, 22, 23, 24, 25, 26, 27, 28, 29, 30, 31, 32, 33, 34, 35, 36, 37, 38, 39, 40, 41, 42, 43, 44, 45, 46, 47, 48, 49, 50, 51, 52, 53, 54, 55, 56, 57, 58, 59, 60, 61, 62, 63, 64, 65, 66, 67, 68, 69, 70, 71, 72, 73, 74, 75, 76, 77, 78, 79, 80, 81, 82, 83, 84, 85, 86, 87, 88, 89, 90, 91, 92, 93, 94, 95, 96, 97, 98, 99, 100, 101, 102, 103, 104, 105, 106, 107, 108, 109, 110, 111, 112, 113, 114, 115, 116, 117, 577, 579, 581, 583, 585, 587, 589, 591, 593, 595, 597, 599, 601, 603, 605, 607, 609, 611, 613, 615, 617, 619, 621, 623, 625, or 627, a variant, derivative, orthologue, paralogue or homologue thereof, in which:

[1368] the amino acid at Mutated site 4 is Tyr, and the amino acid at Mutated site 5 is Asp.

[1369] In another preferred embodiment, the mutated PPO comprises a sequence of SEQ ID NO: 1, 2, 3, 4, 5, 6, 7, 8, 9, 10, 11, 12, 13, 14, 15, 16, 17, 18, 19, 20, 21, 22, 23, 24, 25, 26, 27, 28, 29, 30, 31, 32, 33, 34, 35, 36, 37, 38, 39, 40, 41, 42, 43, 44, 45, 46, 47, 48, 49, 50, 51, 52, 53, 54, 55, 56, 57, 58, 59, 60, 61, 62, 63, 64, 65, 66, 67, 68, 69, 70, 71, 72, 73, 74, 75, 76, 77, 78, 79, 80, 81, 82, 83, 84, 85, 86, 87, 88, 89, 90, 91, 92, 93, 94, 95, 96, 97, 98, 99, 100, 101, 102, 103, 104, 105, 106, 107, 108, 109, 110, 111, 112, 113, 114, 115, 116, 117, 577, 579, 581, 583, 585, 587, 589, 591, 593, 595, 597, 599, 601, 603, 605, 607, 609, 611, 613, 615, 617, 619, 621, 623, 625, or 627, a variant, derivative, orthologue, paralogue or homologue thereof, in which:

[1370] the amino acid at Mutated site 4 is Tyr, and the amino acid at Mutated site 5 is Glu.

[1371] In another preferred embodiment, the mutated PPO comprises a sequence of SEQ ID NO: 1, 2, 3, 4, 5, 6, 7, 8, 9, 10, 11, 12, 13, 14, 15, 16, 17, 18, 19, 20, 21, 22, 23, 24, 25, 26, 27, 28, 29, 30, 31, 32, 33, 34, 35, 36, 37, 38, 39, 40, 41, 42, 43, 44, 45, 46, 47, 48, 49, 50, 51, 52, 53, 54, 55, 56, 57, 58, 59, 60, 61, 62, 63, 64, 65, 66, 67, 68, 69, 70, 71, 72, 73, 74, 75, 76, 77, 78, 79, 80, 81, 82, 83, 84, 85, 86, 87, 88, 89, 90, 91, 92, 93, 94, 95, 96, 97, 98, 99, 100, 101, 102, 103, 104, 105, 106, 107, 108, 109, 110, 111, 112, 113, 114, 115, 116, 117, 577, 579, 581, 583, 585, 587, 589, 591, 593, 595, 597, 599, 601, 603, 605, 607, 609, 611, 613, 615, 617, 619, 621, 623, 625, or 627, a variant, derivative, orthologue, paralogue or homologue thereof, in which:

[1372] the amino acid at Mutated site 4 is Tyr, and the amino acid at Mutated site 5 is Ser.

[1373] In another preferred embodiment, the mutated PPO comprises a sequence of SEQ ID NO: 1, 2, 3, 4, 5, 6, 7, 8, 9, 10, 11, 12, 13, 14, 15, 16, 17, 18, 19, 20, 21, 22, 23, 24, 25, 26, 27, 28, 29, 30, 31, 32, 33, 34, 35, 36, 37, 38, 39, 40, 41, 42, 43, 44, 45, 46, 47, 48, 49, 50, 51, 52, 53, 54, 55, 56, 57, 58, 59, 60, 61, 62, 63, 64, 65, 66, 67, 68, 69, 70, 71, 72, 73, 74, 75, 76, 77, 78, 79, 80, 81, 82, 83, 84, 85, 86, 87, 88, 89, 90, 91, 92, 93, 94, 95, 96, 97, 98, 99, 100, 101, 102, 103, 104, 105, 106, 107, 108, 109, 110, 111, 112, 113, 114, 115, 116, 117, 577, 579, 581, 583, 585, 587, 589, 591, 593, 595, 597, 599, 601, 603, 605, 607, 609, 611, 613, 615, 617, 619, 621, 623, 625, or 627, a variant, derivative, orthologue, paralogue or homologue thereof, in which:

[1374] the amino acid at Mutated site 4 is Tyr, and the amino acid at Mutated site 5 is Thr.

[1375] In another preferred embodiment, the mutated PPO comprises a sequence of SEQ ID NO: 1, 2, 3, 4, 5, 6, 7, 8, 9, 10, 11, 12, 13, 14, 15, 16, 17, 18, 19, 20, 21, 22, 23, 24, 25, 26, 27, 28, 29, 30, 31, 32, 33, 34, 35, 36, 37, 38, 39, 40, 41, 42, 43, 44, 45, 46, 47, 48, 49, 50, 51, 52, 53, 54, 55, 56, 57, 58, 59, 60, 61, 62, 63, 64, 65, 66, 67, 68, 69, 70, 71, 72, 73, 74, 75, 76, 77, 78, 79, 80, 81, 82, 83, 84, 85, 86, 87, 88, 89, 90, 91, 92, 93, 94, 95, 96, 97, 98, 99, 100, 101, 102, 103, 104, 105, 106, 107, 108, 109, 110, 111, 112, 113, 114, 115, 116, 117, 577, 579, 581, 583, 585, 587, 589, 591, 593, 595, 597, 599, 601, 603, 605, 607, 609, 611, 613, 615, 617, 619, 621, 623, 625, or 627, a variant, derivative, orthologue, paralogue or homologue thereof, in which:

[1376] the amino acid at Mutated site 4 is Tyr, and the amino acid at Mutated site 5 is Asn.

[1377] In another preferred embodiment, the mutated PPO comprises a sequence of SEQ ID NO: 1, 2, 3, 4, 5, 6, 7, 8, 9, 10, 11, 12, 13, 14, 15, 16, 17, 18, 19, 20, 21, 22, 23, 24, 25, 26, 27, 28, 29, 30, 31, 32, 33, 34, 35, 36, 37, 38, 39, 40, 41, 42, 43, 44, 45, 46, 47, 48, 49, 50, 51, 52, 53, 54, 55, 56, 57, 58, 59, 60, 61, 62, 63, 64, 65, 66, 67, 68, 69, 70, 71, 72, 73, 74, 75, 76, 77, 78, 79, 80, 81, 82, 83, 84, 85, 86, 87, 88, 89, 90, 91, 92, 93, 94, 95, 96, 97, 98, 99, 100, 101, 102, 103, 104, 105, 106, 107, 108, 109, 110, 111, 112, 113, 114, 115, 116, 117, 577, 579, 581, 583, 585, 587, 589, 591, 593, 595, 597, 599, 601, 603, 605, 607, 609, 611, 613, 615, 617, 619, 621, 623, 625, or 627, a variant, derivative, orthologue, paralogue or homologue thereof, in which:

[1378] the amino acid at Mutated site 4 is Tyr, and the amino acid at Mutated site 5 is Gln.

[1379] In another preferred embodiment, the mutated PPO comprises a sequence of SEQ ID NO: 1, 2, 3, 4, 5, 6, 7, 8, 9, 10, 11, 12, 13, 14, 15, 16, 17, 18, 19, 20, 21, 22, 23, 24, 25, 26, 27, 28, 29, 30, 31, 32, 33, 34, 35, 36, 37, 38, 39, 40, 41, 42, 43, 44, 45, 46, 47, 48, 49, 50, 51, 52, 53, 54, 55, 56, 57, 58, 59, 60, 61, 62, 63, 64, 65, 66, 67, 68, 69, 70, 71, 72, 73, 74, 75, 76, 77, 78, 79, 80, 81, 82, 83, 84, 85, 86, 87, 88, 89, 90, 91, 92, 93, 94, 95, 96, 97, 98, 99, 100, 101, 102, 103, 104, 105, 106, 107, 108, 109, 110, 111, 112, 113, 114, 115, 116, 117, 577, 579, 581, 583, 585, 587, 589, 591, 593, 595, 597, 599, 601, 603, 605, 607, 609, 611, 613, 615, 617, 619, 621, 623, 625, or 627, a variant, derivative, orthologue, paralogue or homologue thereof, in which:

[1380] the amino acid at Mutated site 4 is Tyr, and the amino acid at Mutated site 5 is Cys.

[1381] In another preferred embodiment, the mutated PPO comprises a sequence of SEQ ID NO: 1, 2, 3, 4, 5, 6, 7, 8, 9, 10, 11, 12, 13, 14, 15, 16, 17, 18, 19, 20, 21, 22, 23, 24, 25, 26, 27, 28, 29, 30, 31, 32, 33, 34, 35, 36, 37, 38, 39, 40, 41, 42, 43, 44, 45, 46, 47, 48, 49, 50, 51, 52, 53, 54, 55, 56, 57, 58, 59, 60, 61, 62, 63, 64, 65, 66, 67, 68, 69, 70, 71, 72, 73, 74, 75, 76, 77, 78, 79, 80, 81, 82, 83, 84, 85, 86, 87, 88, 89, 90, 91, 92, 93, 94, 95, 96, 97, 98, 99, 100, 101, 102, 103, 104, 105, 106, 107, 108, 109, 110, 111, 112, 113, 114, 115, 116, 117, 577, 579, 581, 583, 585, 587, 589, 591, 593, 595, 597, 599, 601, 603, 605, 607, 609, 611, 613, 615, 617, 619, 621, 623, 625, or 627, a variant, derivative, orthologue, paralogue or homologue thereof, in which:

[1382] the amino acid at Mutated site 4 is Tyr, and the amino acid at Mutated site 5 is Gly.

[1383] In another preferred embodiment, the mutated PPO comprises a sequence of SEQ ID NO: 1, 2, 3, 4, 5, 6, 7, 8, 9, 10, 11, 12, 13, 14, 15, 16, 17, 18, 19, 20, 21, 22, 23, 24, 25, 26, 27, 28, 29, 30, 31, 32, 33, 34, 35, 36, 37, 38, 39, 40, 41, 42, 43, 44, 45, 46, 47, 48, 49, 50, 51, 52, 53, 54, 55, 56, 57, 58, 59, 60, 61, 62, 63, 64, 65, 66, 67, 68, 69, 70, 71, 72, 73, 74, 75, 76, 77, 78, 79, 80, 81, 82, 83, 84, 85, 86, 87, 88, 89, 90, 91, 92, 93, 94, 95, 96, 97, 98, 99, 100, 101, 102, 103, 104, 105, 106, 107, 108, 109, 110, 111, 112, 113, 114, 115, 116, 117, 577, 579, 581, 583, 585, 587, 589, 591, 593, 595, 597, 599, 601, 603, 605, 607, 609, 611, 613, 615, 617, 619, 621, 623, 625, or 627, a variant, derivative, orthologue, paralogue or homologue thereof, in which:

[1384] the amino acid at Mutated site 4 is Tyr, and the amino acid at Mutated site 5 is Pro.

[1385] In another preferred embodiment, the mutated PPO comprises a sequence of SEQ ID NO: 1, 2, 3, 4, 5, 6, 7, 8, 9, 10, 11, 12, 13, 14, 15, 16, 17, 18, 19, 20, 21, 22, 23, 24, 25, 26, 27, 28, 29, 30, 31, 32, 33, 34, 35, 36, 37, 38, 39, 40, 41, 42, 43, 44, 45, 46, 47, 48, 49, 50, 51, 52, 53, 54, 55, 56, 57, 58, 59, 60, 61, 62, 63, 64, 65, 66, 67, 68, 69, 70, 71, 72, 73, 74, 75, 76, 77, 78, 79, 80, 81, 82, 83, 84, 85, 86, 87, 88, 89, 90, 91, 92, 93, 94, 95, 96, 97, 98, 99, 100, 101, 102, 103, 104, 105, 106, 107, 108, 109, 110, 111, 112, 113, 114, 115, 116, 117, 577, 579, 581, 583, 585, 587, 589, 591, 593, 595, 597, 599, 601, 603, 605, 607, 609, 611, 613, 615, 617, 619, 621, 623, 625, or 627, a variant, derivative, orthologue, paralogue or homologue thereof, in which:

[1386] the amino acid at Mutated site 4 is Tyr, and the amino acid at Mutated site 5 is Arg.

[1387] In another preferred embodiment, the mutated PPO comprises a sequence of SEQ ID NO: 1, 2, 3, 4, 5, 6, 7, 8, 9, 10, 11, 12, 13, 14, 15, 16, 17, 18, 19, 20, 21, 22, 23, 24, 25, 26, 27, 28, 29, 30, 31, 32, 33, 34, 35, 36, 37, 38, 39, 40, 41, 42, 43, 44, 45, 46, 47, 48, 49, 50, 51, 52, 53, 54, 55, 56, 57, 58, 59, 60, 61, 62, 63, 64, 65, 66, 67, 68, 69, 70, 71, 72, 73, 74, 75, 76, 77, 78, 79, 80, 81, 82, 83, 84, 85, 86, 87, 88, 89, 90, 91, 92, 93, 94, 95, 96, 97, 98, 99, 100, 101, 102, 103, 104, 105, 106, 107, 108, 109, 110, 111, 112, 113, 114, 115, 116, 117, 577, 579, 581, 583, 585, 587, 589, 591, 593, 595, 597, 599, 601, 603, 605, 607, 609, 611, 613, 615, 617, 619, 621, 623, 625, or 627, a variant, derivative, orthologue, paralogue or homologue thereof, in which:

[1388] the amino acid at Mutated site 4 is Tyr, and the amino acid at Mutated site 5 is Tyr.

[1389] In another preferred embodiment, the mutated PPO comprises a sequence of SEQ ID NO: 1, 2, 3, 4, 5, 6, 7, 8, 9, 10, 11, 12, 13, 14, 15, 16, 17, 18, 19, 20, 21, 22, 23, 24, 25, 26, 27, 28, 29, 30, 31, 32, 33, 34, 35, 36, 37, 38, 39, 40, 41, 42, 43, 44, 45, 46, 47, 48, 49, 50, 51, 52, 53, 54, 55, 56, 57, 58, 59, 60, 61, 62, 63, 64, 65, 66, 67, 68, 69, 70, 71, 72, 73, 74, 75, 76, 77, 78, 79, 80, 81, 82, 83, 84, 85, 86, 87, 88, 89, 90, 91, 92, 93, 94, 95, 96, 97, 98, 99, 100, 101, 102, 103, 104, 105, 106, 107, 108, 109, 110, 111, 112, 113, 114, 115, 116, 117, 577, 579, 581, 583, 585, 587, 589, 591, 593, 595, 597, 599, 601, 603, 605, 607, 609, 611, 613, 615, 617, 619, 621, 623, 625, or 627, a variant, derivative, orthologue, paralogue or homologue thereof, in which:

[1390] the amino acid at Mutated site 4 is Tyr, and the amino acid at Mutated site 5 is Trp.

[1391] In another preferred embodiment, the mutated PPO comprises a sequence of SEQ ID NO: 1, 2, 3, 4, 5, 6, 7, 8, 9, 10, 11, 12, 13, 14, 15, 16, 17, 18, 19, 20, 21, 22, 23, 24, 25, 26, 27, 28, 29, 30, 31, 32, 33, 34, 35, 36, 37, 38, 39, 40, 41, 42, 43, 44, 45, 46, 47, 48, 49, 50, 51, 52, 53, 54, 55, 56, 57, 58, 59, 60, 61, 62, 63, 64, 65, 66, 67, 68, 69, 70, 71, 72, 73, 74, 75, 76, 77, 78, 79, 80, 81, 82, 83, 84, 85, 86, 87, 88, 89, 90, 91, 92, 93, 94, 95, 96, 97, 98, 99, 100, 101, 102, 103, 104, 105, 106, 107, 108, 109, 110, 111, 112, 113, 114, 115, 116, 117, 577, 579, 581, 583, 585, 587, 589, 591, 593, 595, 597, 599, 601, 603, 605, 607, 609, 611, 613, 615, 617, 619, 621, 623, 625, or 627, a variant, derivative, orthologue, paralogue or homologue thereof, in which:

[1392] the amino acid at Mutated site 4 is Trp, and the amino acid at Mutated site 5 is Ala.

[1393] In another preferred embodiment, the mutated PPO comprises a sequence of SEQ ID NO: 1, 2, 3, 4, 5, 6, 7, 8, 9, 10, 11, 12, 13, 14, 15, 16, 17, 18, 19, 20, 21, 22, 23, 24, 25, 26, 27, 28, 29, 30, 31, 32, 33, 34, 35, 36, 37, 38, 39, 40, 41, 42, 43, 44, 45, 46, 47, 48, 49, 50, 51, 52, 53, 54, 55, 56, 57, 58, 59, 60, 61, 62, 63, 64, 65, 66, 67, 68, 69, 70, 71, 72, 73, 74, 75, 76, 77, 78, 79, 80, 81, 82, 83, 84, 85, 86, 87, 88, 89, 90, 91, 92, 93, 94, 95, 96, 97, 98, 99, 100, 101, 102, 103, 104, 105, 106, 107, 108, 109, 110, 111, 112, 113, 114, 115, 116, 117, 577, 579, 581, 583, 585, 587, 589, 591, 593, 595, 597, 599, 601, 603, 605, 607, 609, 611, 613, 615, 617, 619, 621, 623, 625, or 627, a variant, derivative, orthologue, paralogue or homologue thereof, in which:

[1394] the amino acid at Mutated site 4 is Trp, and the amino acid at Mutated site 5 is Leu.

[1395] In another preferred embodiment, the mutated PPO comprises a sequence of SEQ ID NO: 1, 2, 3, 4, 5, 6, 7, 8, 9, 10, 11, 12, 13, 14, 15, 16, 17, 18, 19, 20, 21, 22, 23, 24, 25, 26, 27, 28, 29, 30, 31, 32, 33, 34, 35, 36, 37, 38, 39, 40, 41, 42, 43, 44, 45, 46, 47, 48, 49, 50, 51, 52, 53, 54, 55, 56, 57, 58, 59, 60, 61, 62, 63, 64, 65, 66, 67, 68, 69, 70, 71, 72, 73, 74, 75, 76, 77, 78, 79, 80, 81, 82, 83, 84, 85, 86, 87, 88, 89, 90, 91, 92, 93, 94, 95, 96, 97, 98, 99, 100, 101, 102, 103, 104, 105, 106, 107, 108, 109, 110, 111, 112, 113, 114, 115, 116, 117, 577, 579, 581, 583, 585, 587, 589, 591, 593, 595, 597, 599, 601, 603, 605, 607, 609, 611, 613, 615, 617, 619, 621, 623, 625, or 627, a variant, derivative, orthologue, paralogue or homologue thereof, in which:

[1396] the amino acid at Mutated site 4 is Trp, and the amino acid at Mutated site 5 is Val.

[1397] In another preferred embodiment, the mutated PPO comprises a sequence of SEQ ID NO: 1, 2, 3, 4, 5, 6, 7, 8, 9, 10, 11, 12, 13, 14, 15, 16, 17, 18, 19, 20, 21, 22, 23, 24, 25, 26, 27, 28, 29, 30, 31, 32, 33, 34, 35, 36, 37, 38, 39, 40, 41, 42, 43, 44, 45, 46, 47, 48, 49, 50, 51, 52, 53, 54, 55, 56, 57, 58, 59, 60, 61, 62, 63, 64, 65, 66, 67, 68, 69, 70, 71, 72, 73, 74, 75, 76, 77, 78, 79, 80, 81, 82, 83, 84, 85, 86, 87, 88, 89, 90, 91, 92, 93, 94, 95, 96, 97, 98, 99, 100, 101, 102, 103, 104, 105, 106, 107, 108, 109, 110, 111, 112, 113, 114, 115, 116, 117, 577, 579, 581, 583, 585, 587, 589, 591, 593, 595, 597, 599, 601, 603, 605, 607, 609, 611, 613, 615, 617, 619, 621, 623, 625, or 627, a variant, derivative, orthologue, paralogue or homologue thereof, in which:

[1398] the amino acid at Mutated site 4 is Trp, and the amino acid at Mutated site 5 is Ile.

[1399] In another preferred embodiment, the mutated PPO comprises a sequence of SEQ ID NO: 1, 2, 3, 4, 5, 6, 7, 8, 9, 10, 11, 12, 13, 14, 15, 16, 17, 18, 19, 20, 21, 22, 23, 24, 25, 26, 27, 28, 29, 30, 31, 32, 33, 34, 35, 36, 37, 38, 39, 40, 41, 42, 43, 44, 45, 46, 47, 48, 49, 50, 51, 52, 53, 54, 55, 56, 57, 58, 59, 60, 61, 62, 63, 64, 65, 66, 67, 68, 69, 70, 71, 72, 73, 74, 75, 76, 77, 78, 79, 80, 81, 82, 83, 84, 85, 86, 87, 88, 89, 90, 91, 92, 93, 94, 95, 96, 97, 98, 99, 100, 101, 102, 103, 104, 105, 106, 107, 108, 109, 110, 111, 112, 113, 114, 115, 116, 117, 577, 579, 581, 583, 585, 587, 589, 591, 593, 595, 597, 599, 601, 603, 605, 607, 609, 611, 613, 615, 617, 619, 621, 623, 625, or 627, a variant, derivative, orthologue, paralogue or homologue thereof, in which:

[1400] the amino acid at Mutated site 4 is Trp, and the amino acid at Mutated site 5 is Met.

[1401] In another preferred embodiment, the mutated PPO comprises a sequence of SEQ ID NO: 1, 2, 3, 4, 5, 6, 7, 8, 9, 10, 11, 12, 13, 14, 15, 16, 17, 18, 19, 20, 21, 22, 23, 24, 25, 26, 27, 28, 29, 30, 31, 32, 33, 34, 35, 36, 37, 38, 39, 40, 41, 42, 43, 44, 45, 46, 47, 48, 49, 50, 51, 52, 53, 54, 55, 56, 57, 58, 59, 60, 61, 62, 63, 64, 65, 66, 67, 68, 69, 70, 71, 72, 73, 74, 75, 76, 77, 78, 79, 80, 81, 82, 83, 84, 85, 86, 87, 88, 89, 90, 91, 92, 93, 94, 95, 96, 97, 98, 99, 100, 101, 102, 103, 104, 105, 106, 107, 108, 109, 110, 111, 112, 113, 114, 115, 116, 117, 577, 579, 581, 583, 585, 587, 589, 591, 593, 595, 597, 599, 601, 603, 605, 607, 609, 611, 613, 615, 617, 619, 621, 623, 625, or 627, a variant, derivative, orthologue, paralogue or homologue thereof, in which:

[1402] the amino acid at Mutated site 4 is Trp, and the amino acid at Mutated site 5 is His.

[1403] In another preferred embodiment, the mutated PPO comprises a sequence of SEQ ID NO: 1, 2, 3, 4, 5, 6, 7, 8, 9, 10, 11, 12, 13, 14, 15, 16, 17, 18, 19, 20, 21, 22, 23, 24, 25, 26, 27, 28, 29, 30, 31, 32, 33, 34, 35, 36, 37, 38, 39, 40, 41, 42, 43, 44, 45, 46, 47, 48, 49, 50, 51, 52, 53, 54, 55, 56, 57, 58, 59, 60, 61, 62, 63, 64, 65, 66, 67, 68, 69, 70, 71, 72, 73, 74, 75, 76, 77, 78, 79, 80, 81, 82, 83, 84, 85, 86, 87, 88, 89, 90, 91, 92, 93, 94, 95, 96, 97, 98, 99, 100, 101, 102, 103, 104, 105, 106, 107, 108, 109, 110, 111, 112, 113, 114, 115, 116, 117, 577, 579, 581, 583, 585, 587, 589, 591, 593, 595, 597, 599, 601, 603, 605, 607, 609, 611, 613, 615, 617, 619, 621, 623, 625, or 627, a variant, derivative, orthologue, paralogue or homologue thereof, in which:

[1404] the amino acid at Mutated site 4 is Trp, and the amino acid at Mutated site 5 is Lys.

[1405] In another preferred embodiment, the mutated PPO comprises a sequence of SEQ ID NO: 1, 2, 3, 4, 5, 6, 7, 8, 9, 10, 11, 12, 13, 14, 15, 16, 17, 18, 19, 20, 21, 22, 23, 24, 25, 26, 27, 28, 29, 30, 31, 32, 33, 34, 35, 36, 37, 38, 39, 40, 41, 42, 43, 44, 45, 46, 47, 48, 49, 50, 51, 52, 53, 54, 55, 56, 57, 58, 59, 60, 61, 62, 63, 64, 65, 66, 67, 68, 69, 70, 71, 72, 73, 74, 75, 76, 77, 78, 79, 80, 81, 82, 83, 84, 85, 86, 87, 88, 89, 90, 91, 92, 93, 94, 95, 96, 97, 98, 99, 100, 101, 102, 103, 104, 105, 106, 107, 108, 109, 110, 111, 112, 113, 114, 115, 116, 117, 577, 579, 581, 583, 585, 587, 589, 591, 593, 595, 597, 599, 601, 603, 605, 607, 609, 611, 613, 615, 617, 619, 621, 623, 625, or 627, a variant, derivative, orthologue, paralogue or homologue thereof, in which:

[1406] the amino acid at Mutated site 4 is Trp, and the amino acid at Mutated site 5 is Asp.

[1407] In another preferred embodiment, the mutated PPO comprises a sequence of SEQ ID NO: 1, 2, 3, 4, 5, 6, 7, 8, 9, 10, 11, 12, 13, 14, 15, 16, 17, 18, 19, 20, 21, 22, 23, 24, 25, 26, 27, 28, 29, 30, 31, 32, 33, 34, 35, 36, 37, 38, 39, 40, 41, 42, 43, 44, 45, 46, 47, 48, 49, 50, 51, 52, 53, 54, 55, 56, 57, 58, 59, 60, 61, 62, 63, 64, 65, 66, 67, 68, 69, 70, 71, 72, 73, 74, 75, 76, 77, 78, 79, 80, 81, 82, 83, 84, 85, 86, 87, 88, 89, 90, 91, 92, 93, 94, 95, 96, 97, 98, 99, 100, 101, 102, 103, 104, 105, 106, 107, 108, 109, 110, 111, 112, 113, 114, 115, 116, 117, 577, 579, 581, 583, 585, 587, 589, 591, 593, 595, 597, 599, 601, 603, 605, 607, 609, 611, 613, 615, 617, 619, 621, 623, 625, or 627, a variant, derivative, orthologue, paralogue or homologue thereof, in which:

[1408] the amino acid at Mutated site 4 is Trp, and the amino acid at Mutated site 5 is Glu.

[1409] In another preferred embodiment, the mutated PPO comprises a sequence of SEQ ID NO: 1, 2, 3, 4, 5, 6, 7, 8, 9, 10, 11, 12, 13, 14, 15, 16, 17, 18, 19, 20, 21, 22, 23, 24, 25, 26, 27, 28, 29, 30, 31, 32, 33, 34, 35, 36, 37, 38, 39, 40, 41, 42, 43, 44, 45, 46, 47, 48, 49, 50, 51, 52, 53, 54, 55, 56, 57, 58, 59, 60, 61, 62, 63, 64, 65, 66, 67, 68, 69, 70, 71, 72, 73, 74, 75, 76, 77, 78, 79, 80, 81, 82, 83, 84, 85, 86, 87, 88, 89, 90, 91, 92, 93, 94, 95, 96, 97, 98, 99, 100, 101, 102, 103, 104, 105, 106, 107, 108, 109, 110, 111, 112, 113, 114, 115, 116, 117, 577, 579, 581, 583, 585, 587, 589, 591, 593, 595, 597, 599, 601, 603, 605, 607, 609, 611, 613, 615, 617, 619, 621, 623, 625, or 627, a variant, derivative, orthologue, paralogue or homologue thereof, in which:

[1410] the amino acid at Mutated site 4 is Trp, and the amino acid at Mutated site 5 is Ser.

[1411] In another preferred embodiment, the mutated PPO comprises a sequence of SEQ ID NO: 1, 2, 3, 4, 5, 6, 7, 8, 9, 10, 11, 12, 13, 14, 15, 16, 17, 18, 19, 20, 21, 22, 23, 24, 25, 26, 27, 28, 29, 30, 31, 32, 33, 34, 35, 36, 37, 38, 39, 40, 41, 42, 43, 44, 45, 46, 47, 48, 49, 50, 51, 52, 53, 54, 55, 56, 57, 58, 59, 60, 61, 62, 63, 64, 65, 66, 67, 68, 69, 70, 71, 72, 73, 74, 75, 76, 77, 78, 79, 80, 81, 82, 83, 84, 85, 86, 87, 88, 89, 90, 91, 92, 93, 94, 95, 96, 97, 98, 99, 100, 101, 102, 103, 104, 105, 106, 107, 108, 109, 110, 111, 112, 113, 114, 115, 116, 117, 577, 579, 581, 583, 585, 587, 589, 591, 593, 595, 597, 599, 601, 603, 605, 607, 609, 611, 613, 615, 617, 619, 621, 623, 625, or 627, a variant, derivative, orthologue, paralogue or homologue thereof, in which:

[1412] the amino acid at Mutated site 4 is Trp, and the amino acid at Mutated site 5 is Thr.

[1413] In another preferred embodiment, the mutated PPO comprises a sequence of SEQ ID NO: 1, 2, 3, 4, 5, 6, 7, 8, 9, 10, 11, 12, 13, 14, 15, 16, 17, 18, 19, 20, 21, 22, 23, 24, 25, 26, 27, 28, 29, 30, 31, 32, 33, 34, 35, 36, 37, 38, 39, 40, 41, 42, 43, 44, 45, 46, 47, 48, 49, 50, 51, 52, 53, 54, 55, 56, 57, 58, 59, 60, 61, 62, 63, 64, 65, 66, 67, 68, 69, 70, 71, 72, 73, 74, 75, 76, 77, 78, 79, 80, 81, 82, 83, 84, 85, 86, 87, 88, 89, 90, 91, 92, 93, 94, 95, 96, 97, 98, 99, 100, 101, 102, 103, 104, 105, 106, 107, 108, 109, 110, 111, 112, 113, 114, 115, 116, 117, 577, 579, 581, 583, 585, 587, 589, 591, 593, 595, 597, 599, 601, 603, 605, 607, 609, 611, 613, 615, 617, 619, 621, 623, 625, or 627, a variant, derivative, orthologue, paralogue or homologue thereof, in which:

[1414] the amino acid at Mutated site 4 is Trp, and the amino acid at Mutated site 5 is Asn.

[1415] In another preferred embodiment, the mutated PPO comprises a sequence of SEQ ID NO: 1, 2, 3, 4, 5, 6, 7, 8, 9, 10, 11, 12, 13, 14, 15, 16, 17, 18, 19, 20, 21, 22, 23, 24, 25, 26, 27, 28, 29, 30, 31, 32, 33, 34, 35, 36, 37, 38, 39, 40, 41, 42, 43, 44, 45, 46, 47, 48, 49, 50, 51, 52, 53, 54, 55, 56, 57, 58, 59, 60, 61, 62, 63, 64, 65, 66, 67, 68, 69, 70, 71, 72, 73, 74, 75, 76, 77, 78, 79, 80, 81, 82, 83, 84, 85, 86, 87, 88, 89, 90, 91, 92, 93, 94, 95, 96, 97, 98, 99, 100, 101, 102, 103, 104, 105, 106, 107, 108, 109, 110, 111, 112, 113, 114, 115, 116, 117, 577, 579, 581, 583, 585, 587, 589, 591, 593, 595, 597, 599, 601, 603, 605, 607, 609, 611, 613, 615, 617, 619, 621, 623, 625, or 627, a variant, derivative, orthologue, paralogue or homologue thereof, in which:

[1416] the amino acid at Mutated site 4 is Trp, and the amino acid at Mutated site 5 is Gln.

[1417] In another preferred embodiment, the mutated PPO comprises a sequence of SEQ ID NO: 1, 2, 3, 4, 5, 6, 7, 8, 9, 10, 11, 12, 13, 14, 15, 16, 17, 18, 19, 20, 21, 22, 23, 24, 25, 26, 27, 28, 29, 30, 31, 32, 33, 34, 35, 36, 37, 38, 39, 40, 41, 42, 43, 44, 45, 46, 47, 48, 49, 50, 51, 52, 53, 54, 55, 56, 57, 58, 59, 60, 61, 62, 63, 64, 65, 66, 67, 68, 69, 70, 71, 72, 73, 74, 75, 76, 77, 78, 79, 80, 81, 82, 83, 84, 85, 86, 87, 88, 89, 90, 91, 92, 93, 94, 95, 96, 97, 98, 99, 100, 101, 102, 103, 104, 105, 106, 107, 108, 109, 110, 111, 112, 113, 114, 115, 116, 117, 577, 579, 581, 583, 585, 587, 589, 591, 593, 595, 597, 599, 601, 603, 605, 607, 609, 611, 613, 615, 617, 619, 621, 623, 625, or 627, a variant, derivative, orthologue, paralogue or homologue thereof, in which:

[1418] the amino acid at Mutated site 4 is Trp, and the amino acid at Mutated site 5 is Cys.

[1419] In another preferred embodiment, the mutated PPO comprises a sequence of SEQ ID NO: 1, 2, 3, 4, 5, 6, 7, 8, 9, 10, 11, 12, 13, 14, 15, 16, 17, 18, 19, 20, 21, 22, 23, 24, 25, 26, 27, 28, 29, 30, 31, 32, 33, 34, 35, 36, 37, 38, 39, 40, 41, 42, 43, 44, 45, 46, 47, 48, 49, 50, 51, 52, 53, 54, 55, 56, 57, 58, 59, 60, 61, 62, 63, 64, 65, 66, 67, 68, 69, 70, 71, 72, 73, 74, 75, 76, 77, 78, 79, 80, 81, 82, 83, 84, 85, 86, 87, 88, 89, 90, 91, 92, 93, 94, 95, 96, 97, 98, 99, 100, 101, 102, 103, 104, 105, 106, 107, 108, 109, 110, 111, 112, 113, 114, 115, 116, 117, 577, 579, 581, 583, 585, 587, 589, 591, 593, 595, 597, 599, 601, 603, 605, 607, 609, 611, 613, 615, 617, 619, 621, 623, 625, or 627, a variant, derivative, orthologue, paralogue or homologue thereof, in which:

[1420] the amino acid at Mutated site 4 is Trp, and the amino acid at Mutated site 5 is Gly.

[1421] In another preferred embodiment, the mutated PPO comprises a sequence of SEQ ID NO: 1, 2, 3, 4, 5, 6, 7, 8, 9, 10, 11, 12, 13, 14, 15, 16, 17, 18, 19, 20, 21, 22, 23, 24, 25, 26, 27, 28, 29, 30, 31, 32, 33, 34, 35, 36, 37, 38, 39, 40, 41, 42, 43, 44, 45, 46, 47, 48, 49, 50, 51, 52, 53, 54, 55, 56, 57, 58, 59, 60, 61, 62, 63, 64, 65, 66, 67, 68, 69, 70, 71, 72, 73, 74, 75, 76, 77, 78, 79, 80, 81, 82, 83, 84, 85, 86, 87, 88, 89, 90, 91, 92, 93, 94, 95, 96, 97, 98, 99, 100, 101, 102, 103, 104, 105, 106, 107, 108, 109, 110, 111, 112, 113, 114, 115, 116, 117, 577, 579, 581, 583, 585, 587, 589, 591, 593, 595, 597, 599, 601, 603, 605, 607, 609, 611, 613, 615, 617, 619, 621, 623, 625, or 627, a variant, derivative, orthologue, paralogue or homologue thereof, in which:

[1422] the amino acid at Mutated site 4 is Trp, and the amino acid at Mutated site 5 is Pro.

[1423] In another preferred embodiment, the mutated PPO comprises a sequence of SEQ ID NO: 1, 2, 3, 4, 5, 6, 7, 8, 9, 10, 11, 12, 13, 14, 15, 16, 17, 18, 19, 20, 21, 22, 23, 24, 25, 26, 27, 28, 29, 30, 31, 32, 33, 34, 35, 36, 37, 38, 39, 40, 41, 42, 43, 44, 45, 46, 47, 48, 49, 50, 51, 52, 53, 54, 55, 56, 57, 58, 59, 60, 61, 62, 63, 64, 65, 66, 67, 68, 69, 70, 71, 72, 73, 74, 75, 76, 77, 78, 79, 80, 81, 82, 83, 84, 85, 86, 87, 88, 89, 90, 91, 92, 93, 94, 95, 96, 97, 98, 99, 100, 101, 102, 103, 104, 105, 106, 107, 108, 109, 110, 111, 112, 113, 114, 115, 116, 117, 577, 579, 581, 583, 585, 587, 589, 591, 593, 595, 597, 599, 601, 603, 605, 607, 609, 611, 613, 615, 617, 619, 621, 623, 625, or 627, a variant, derivative, orthologue, paralogue or homologue thereof, in which:

[1424] the amino acid at Mutated site 4 is Trp, and the amino acid at Mutated site 5 is Arg.

[1425] In another preferred embodiment, the mutated PPO comprises a sequence of SEQ ID NO: 1, 2, 3, 4, 5, 6, 7, 8, 9, 10, 11, 12, 13, 14, 15, 16, 17, 18, 19, 20, 21, 22, 23, 24, 25, 26, 27, 28, 29, 30, 31, 32, 33, 34, 35, 36, 37, 38, 39, 40, 41, 42, 43, 44, 45, 46, 47, 48, 49, 50, 51, 52, 53, 54, 55, 56, 57, 58, 59, 60, 61, 62, 63, 64, 65, 66, 67, 68, 69, 70, 71, 72, 73, 74, 75, 76, 77, 78, 79, 80, 81, 82, 83, 84, 85, 86, 87, 88, 89, 90, 91, 92, 93, 94, 95, 96, 97, 98, 99, 100, 101, 102, 103, 104, 105, 106, 107, 108, 109, 110, 111, 112, 113, 114, 115, 116, 117, 577, 579, 581, 583, 585, 587, 589, 591, 593, 595, 597, 599, 601, 603, 605, 607, 609, 611, 613, 615, 617, 619, 621, 623, 625, or 627, a variant, derivative, orthologue, paralogue or homologue thereof, in which:

[1426] the amino acid at Mutated site 4 is Trp, and the amino acid at Mutated site 5 is Tyr.

[1427] In another preferred embodiment, the mutated PPO comprises a sequence of SEQ ID NO: 1, 2, 3, 4, 5, 6, 7, 8, 9, 10, 11, 12, 13, 14, 15, 16, 17, 18, 19, 20, 21, 22, 23, 24, 25, 26, 27, 28, 29, 30, 31, 32, 33, 34, 35, 36, 37, 38, 39, 40, 41, 42, 43, 44, 45, 46, 47, 48, 49, 50, 51, 52, 53, 54, 55, 56, 57, 58, 59, 60, 61, 62, 63, 64, 65, 66, 67, 68, 69, 70, 71, 72, 73, 74, 75, 76, 77, 78, 79, 80, 81, 82, 83, 84, 85, 86, 87, 88, 89, 90, 91, 92, 93, 94, 95, 96, 97, 98, 99, 100, 101, 102, 103, 104, 105, 106, 107, 108, 109, 110, 111, 112, 113, 114, 115, 116, 117, 577, 579, 581, 583, 585, 587, 589, 591, 593, 595, 597, 599, 601, 603, 605, 607, 609, 611, 613, 615, 617, 619, 621, 623, 625, or 627, a variant, derivative, orthologue, paralogue or the amino acid at Mutated site 4 is Trp, and the amino acid at Mutated site 5 is Trp.

[1428] It will be within the knowledge of the skilled artisan to identify conserved regions and motifs shared between the homologues, orthologues and paralogues of PPO polypeptides comprising SEQ ID NO: 1, 2, 3, 4, 5, 6, 7, 8, 9, 10, 11, 12, 13, 14, 15, 16, 17, 18, 19, 20, 21, 22, 23, 24, 25, 26, 27, 28, 29, 30, 31, 32, 33, 34, 35, 36, 37, 38, 39, 40, 41, 42, 43, 44, 45, 46, 47, 48, 49, 50, 51, 52, 53, 54, 55, 56, 57, 58, 59, 60, 61, 62, 63, 64, 65, 66, 67, 68, 69, 70, 71, 72, 73, 74, 75, 76, 77, 78, 79, 80, 81, 82, 83, 84, 85, 86, 87, 88, 89, 90, 91, 92, 93, 94, 95, 96, 97, 98, 99, 100, 101, 102, 103, 104, 105, 106, 107, 108, 109, 110, 111, 112, 113, 114, 115, 116, or 117. Having identified such conserved regions that may represent suitable binding motifs, amino acids corresponding to the amino acids listed in Table 2a and 2b can be chosen to be substituted by any other amino acid, preferably by the amino acids listed under mutated sites 1, 2, 3, 4, or 5.

[1429] Accordingly, preferred motifs shared between the homologues, orthologues and paralogues of PPO polypeptides described above are Motif 1: SQ[N/K/H]KRYI, wherein the Arg at position 5 within said motif is substituted by Leu, Ala, Val, lie, Met, Tyr, Gly, Asn, Cys, Phe, Ser, Thr, Gin, or His; Motif 2: TLGTLFSS, wherein the Leu at position 2 within said motif is substituted by Ala, Arg, Val, lie, Met, His, Lys, Asp, Glu, Ser, Thr, Asn, Gin, Cys, Gly, Pro, Phe, Tyr, or Trp; Motif 3: [F/Y]TTF[V/I]GG, wherein the Phe at position 4 within said motif is substituted by Ala, Leu, Val, lie, Met, His, Lys, Asp, Glu, Ser, Thr, Asn, Gin, Cys, Gly, Pro, Arg, Tyr, or Trp.

[1430] Further examples of such homologues, orthologues and paralogues are PPO polypeptides comprising the amino acid sequence of SEQ ID NO: 577, 579, 581, 583, 585, 587, 589, 591, 593, 595, 597, 599, 601, 603, 605, 607, 609, 611, 613, 615, 617, 619, 621, 623, 625, or 627.

[1431] In addition, the present invention refers to a method for identifying a phenylpyridine herbicide by using a herbicide tolerant PPO polypeptide as defined SUPRA.

[1432] Said method comprises the steps of:
[1433] a) generating a transgenic cell or plant comprising a nucleic acid encoding a mutated PPO, wherein the mutated PPO is expressed;
[1434] b) applying a phenylpyridine herbicide to the transgenic cell or plant of a) and to a control cell or plant of the same variety;
[1435] c) determining the growth or the viability of the transgenic cell or plant and the control cell or plant after application of said phenylpyridine herbicide, and
[1436] d) selecting “phenylpyridine herbicides” which confer reduced growth to the control cell or plant as compared to the growth of the transgenic cell or plant.

[1437] By “control cell” or “similar, wild-type, plant, plant tissue, plant cell or host cell” is intended a plant, plant tissue, plant cell, or host cell, respectively, that lacks the herbicide-resistance characteristics and/or particular polynucleotide of the invention that are disclosed herein. The use of the term “wild-type” is not, therefore, intended to imply that a plant, plant tissue, plant cell, or other host cell lacks recombinant DNA in its genome, and/or does not possess herbicide-resistant characteristics that are different from those disclosed herein.

[1438] Another object refers to a method of identifying a nucleotide sequence encoding a mutated PPO which is resistant or tolerant to a phenylpyridine herbicide, the method comprising:
[1439] a) generating a library of mutated PPO-encoding nucleic acids,
[1440] b) screening a population of the resulting mutated PPO-encoding nucleic acids by expressing each of said nucleic acids in a cell or plant and treating said cell or plant with a phenylpyridine herbicide,
[1441] c) comparing the phenylpyridine herbicide-tolerance levels provided by said population of mutated PPO encoding nucleic acids with the phenylpyridine herbicide-tolerance level provided by a control PPO-encoding nucleic acid,
[1442] d) selecting at least one mutated PPO-encoding nucleic acid that provides a significantly increased level of tolerance to a phenylpyridine herbicide as compared to that provided by the control PPO-encoding nucleic acid.

[1443] In a preferred embodiment, the mutated PPO-encoding nucleic acid selected in step d) provides at least 2-fold as much resistance or tolerance of a cell or plant to a phenylpyridine herbicide as compared to that provided by the control PPO-encoding nucleic acid.

[1444] In a further preferred embodiment, the mutated PPO-encoding nucleic acid selected in step d) provides at least 2-fold, at least 5-fold, at least 10-fold, at least 20-fold, at least 50-fold, at least 100-fold, at least 500-fold, as much resistance or tolerance of a cell or plant to a phenylpyridine herbicide as compared to that provided by the control PPO-encoding nucleic acid.

[1445] The resistance or tolerance can be determined by generating a transgenic plant or host cell, preferably a plant cell, comprising a nucleic acid sequence of the library of step a) and comparing said transgenic plant with a control plant or host cell, preferably a plant cell.

[1446] Another object refers to a method of identifying a plant or algae containing a nucleic acid comprising a nucleotide sequence encoding a wild-type or mutated PPO which is resistant or tolerant to a phenylpyridine herbicide, the method comprising:
[1447] a) identifying an effective amount of a phenylpyridine herbicide in a culture of plant cells or green algae that leads to death of said cells.
[1448] b) treating said plant cells or green algae with a mutagenizing agent,
[1449] c) contacting said mutagenized cells population with an effective amount of phenylpyridine herbicide, identified in a),
[1450] d) selecting at least one cell surviving these test conditions,
[1451] e) PCR-amplification and sequencing of PPO genes from cells selected in d) and comparing such sequences to wild-type PPO gene sequences, respectively.

[1452] In a preferred embodiment, said mutagenizing agent is ethylmethanesulfonate (EMS).

[1453] Many methods well known to the skilled artisan are available for obtaining suitable candidate nucleic acids for identifying a nucleotide sequence encoding a mutated PPO from a variety of different potential source organisms including microbes, plants, fungi, algae, mixed cultures etc. as well as environmental sources of DNA such as soil. These methods include inter alia the preparation of cDNA or genomic DNA libraries, the use of suitably degenerate oligonucleotide primers, the use of probes based upon known sequences or complementation assays (for example, for growth upon tyrosine) as well as the use of mutagenesis and shuffling in order to provide recombined or shuffled mutated PPO-encoding sequences.

[1454] Nucleic acids comprising candidate and control PPO encoding sequences can be expressed in yeast, in a bacterial host strain, in an alga or in a higher plant such as tobacco or Arabidopsis and the relative levels of inherent tolerance of the PPO encoding sequences screened according to a visible indicator phenotype of the transformed strain or plant in the presence of different concentrations of the selected phenylpyridine herbicide. Dose responses and relative shifts in dose responses associated with these indicator phenotypes (formation of brown color, growth inhibition, herbicidal effect etc) are conveniently expressed in terms, for example, of GR50 (concentration for 50% reduction of growth) or MIC (minimum inhibitory concentration) values where increases in values correspond to increases in inherent tolerance of the expressed PPO. For example, in a relatively rapid assay system based upon transformation of a bacterium such as E. coli, each mutated PPO encoding sequence may be expressed, for example, as a DNA sequence under expression control of a controllable promoter such as the lacZ promoter and taking suitable account, for example by the use of synthetic DNA, of such issues as codon usage in order to obtain as comparable a level of expression as possible of different PPO sequences. Such strains expressing nucleic acids comprising alternative candidate PPO sequences may be plated out on different concentrations of the selected phenylpyridine herbicide in, optionally, a tyrosine supplemented medium and the relative levels of inherent tolerance of the expressed PPO enzymes estimated on the basis of the extent and MIC for inhibition of the formation of the brown, ochronotic pigment.

[1455] In another embodiment, candidate nucleic acids are transformed into plant material to generate a transgenic plant, regenerated into morphologically normal fertile plants which are then measured for differential tolerance to selected phenylpyridine herbicides as described in the Example section hereinafter. Many suitable methods for transformation using suitable selection markers such as kanamycin, binary vectors such as from Agrobacterium and plant regeneration as, for example, from tobacco leaf discs are well known in the art. Optionally, a control population of plants is likewise transformed with a nucleic acid expressing the control PPO. Alternatively, an untransformed dicot plant such as Arabidopsis or Tobacco can be used as a control since this, in any case, expresses its own endogenous PPO. The average, and distribution, of herbicide tolerance levels of a range of primary plant transformation events or their progeny to phenylpyridine herbicides described supra are evaluated in the normal manner based upon plant damage, meristematic bleaching symptoms etc. at a range of different concentrations of herbicides. These data can be expressed in terms of, for example, GR50 values derived from dose/response curves having “dose” plotted on the x-axis and “percentage kill”, “herbicidal effect”, “numbers of emerging green plants” etc. plotted on the y-axis where increased GR50 values correspond to increased levels of inherent tolerance of the expressed PPO. Herbicides can suitably be applied pre-emergence or post-emergence.

[1456] In another embodiment, the invention refers to a plant cell transformed by a nucleic acid encoding a herbicide tolerant PPO polypeptide disclosed herein or to a plant cell which has been mutated to obtain a plant expressing a nucleic acid encoding a mutated PPO polypeptide according to the present invention, wherein expression of the nucleic acid in the plant cell results in increased resistance or tolerance to a phenylpyridine herbicide as compared to a wild type variety of the plant cell.

[1457] The term “expression/expressing” or “gene expression” means the transcription of a specific gene or specific genes or specific genetic construct. The term “expression” or “gene expression” in particular means the transcription of a gene or genes or genetic construct into structural RNA (rRNA, tRNA) or mRNA with or without subsequent translation of the latter into a protein. The process includes transcription of DNA and processing of the resulting mRNA product.

[1458] To obtain the desired effect, i.e. plants that are tolerant or resistant to the phenylpyridine herbicide derivative herbicide of the present invention, it will be understood that the at least one nucleic acid is “over-expressed” by methods and means known to the person skilled in the art.

[1459] The term “increased expression” or “overexpression” as used herein means any form of expression that is additional to the original wild-type expression level. Methods for increasing expression of genes or gene products are well documented in the art and include, for example, overexpression driven by appropriate promoters, the use of transcription enhancers or translation enhancers. Isolated nucleic acids which serve as promoter or enhancer elements may be introduced in an appropriate position (typically upstream) of a non-heterologous form of a polynucleotide so as to upregulate expression of a nucleic acid encoding the polypeptide of interest. For example, endogenous promoters may be altered in vivo by mutation, deletion, and/or substitution (see, Kmiec, U.S. Pat. No. 5,565,350; Zarling et al., WO9322443), or isolated promoters may be introduced into a plant cell in the proper orientation and distance from a gene of the present invention so as to control the expression of the gene.

[1460] If polypeptide expression is desired, it is generally desirable to include a polyadenylation region at the 3′-end of a polynucleotide coding region. The polyadenylation region can be derived from the natural gene, from a variety of other plant genes, or from T-DNA. The 3′ end sequence to be added may be derived from, for example, the nopaline synthase or octopine synthase genes, or alternatively from another plant gene, or less preferably from any other eukaryotic gene.

[1461] An intron sequence may also be added to the 5′ untranslated region (UTR) or the coding sequence of the partial coding sequence to increase the amount of the mature message that accumulates in the cytosol. Inclusion of a spliceable intron in the transcription unit in both plant and animal expression constructs has been shown to increase gene expression at both the mRNA and protein levels up to 1000-fold (Buchman and Berg (1988) Mol. Cell biol. 8: 4395-4405; Callis et al. (1987) Genes Dev 1:1183-1200). Such intron enhancement of gene expression is typically greatest when placed near the 5′ end of the transcription unit. Use of the maize introns Adhl-S intron 1, 2, and 6, the Bronze-1 intron are known in the art. For general information see: The Maize Handbook, Chapter 116, Freeling and Walbot, Eds., Springer, N.Y. (1994)

[1462] The term “introduction” or “transformation” as referred to herein encompasses the transfer of an exogenous polynucleotide into a host cell, irrespective of the method used for transfer. Plant tissue capable of subsequent clonal propagation, whether by organogenesis or embryogenesis, may be transformed with a genetic construct of the present invention and a whole plant regenerated there from. The particular tissue chosen will vary depending on the clonal propagation systems available for, and best suited to, the particular species being transformed. Exemplary tissue targets include leaf disks, pollen, embryos, cotyledons, hypocotyls, megagametophytes, callus tissue, existing meristematic tissue (e.g., apical meristem, axillary buds, and root meristems), and induced meristem tissue (e.g., cotyledon meristem and hypocotyl meristem). The polynucleotide may be transiently or stably introduced into a host cell and may be maintained non-integrated, for example, as a plasmid. Alternatively, it may be integrated into the host genome. The resulting transformed plant cell may then be used to regenerate a transformed plant in a manner known to persons skilled in the art.

[1463] The transfer of foreign genes into the genome of a plant is called transformation. Transformation of plant species is now a fairly routine technique. Advantageously, any of several transformation methods may be used to introduce the gene of interest into a suitable ancestor cell. The methods described for the transformation and regeneration of plants from plant tissues or plant cells may be utilized for transient or for stable transformation. Transformation methods include the use of liposomes, electroporation, chemicals that increase free DNA uptake, injection of the DNA directly into the plant, particle gun bombardment, transforrmation using viruses or pollen and microprojection. Methods may be selected from the calcium/polyethylene glycol method for protoplasts (Krens, F. A. et al., (1982) Nature 296, 72-74; Negrutiu I et al. (1987) Plant Mol Biol 8: 363-373); electroporation of protoplasts (Shillito R. D. et al. (1985) Bio/Technol 3, 1099-1102); microinjection into plant material (Crossway A et al., (1986) Mol. Gen Genet 202: 179-185); DNA or RNA-coated particle bombardment (Klein T M et al., (1987) Nature 327: 70) infection with (non-integrative) viruses and the like. Transgenic plants, including transgenic crop plants, are preferably produced via Agrobacterium-mediated transformation. An advantageous transformation method is the transformation in planta. To this end, it is possible, for example, to allow the agrobacteria to act on plant seeds or to inoculate the plant meristem with agrobacteria. It has proved particularly expedient in accordance with the invention to allow a suspension of transformed agrobacteria to act on the intact plant or at least on the flower primordia. The plant is subsequently grown on until the seeds of the treated plant are obtained (Clough and Bent, Plant J. (1998) 16, 735-743). Methods for Agrobacterium-mediated transformation of rice include well known methods for rice transformation, such as those described in any of the following: European patent application EP 1198985 A1, Aldemita and Hodges (Planta 199: 612-617, 1996); Chan et al. (Plant Mol Biol 22 (3): 491-506, 1993), Hiei et al. (Plant J 6 (2): 271-282, 1994), which disclosures are incorporated by reference herein as if fully set forth. In the case of corn transformation, the preferred method is as described in either Ishida et al. (Nat. Biotechnol 14(6): 745-50, 1996) or Frame et al. (Plant Physiol 129(1): 13-22, 2002), which disclosures are incorporated by reference herein as if fully set forth. Said methods are further described by way of example in B. Jenes et al., Techniques for Gene Transfer, in: Transgenic Plants, Vol. 1, Engineering and Utilization, eds. S. D. Kung and R. Wu, Academic Press (1993) 128-143 and in Potrykus Annu. Rev. Plant Physiol. Plant Molec. Biol. 42 (1991) 205-225). The nucleic acids or the construct to be expressed is preferably cloned into a vector, which is suitable for transforming Agrobacterium tumefaciens, for example pBin19 (Bevan et al., Nucl. Acids Res. 12 (1984) 8711). Agrobacteria transformed by such a vector can then be used in known manner for the transformation of plants, such as plants used as a model, like Arabidopsis (Arabidopsis thaliana is within the scope of the present invention not considered as a crop plant), or crop plants such as, by way of example, tobacco plants, for example by immersing bruised leaves or chopped leaves in an agrobacterial solution and then culturing them in suitable media. The transformation of plants by means of Agrobacterium tumefaciens is described, for example, by Hofgen and Willmitzer in Nucl. Acid Res. (1988) 16, 9877 or is known inter alia from F. F. White, Vectors for Gene Transfer in Higher Plants; in Transgenic Plants, Vol. 1, Engineering and Utilization, eds. S. D. Kung and R. Wu, Academic Press, 1993, pp. 15-38.

[1464] In addition to the transformation of somatic cells, which then have to be regenerated into intact plants, it is also possible to transform the cells of plant meristems and in particular those cells which develop into gametes. In this case, the transformed gametes follow the natural plant development, giving rise to transgenic plants. Thus, for example, seeds of Arabidopsis are treated with agrobacteria and seeds are obtained from the developing plants of which a certain proportion is transformed and thus transgenic [Feldman, K A and Marks M D (1987). Mol Gen Genet 208:274-289; Feldmann K (1992). In: C Koncz, N-H Chua and J Shell, eds, Methods in Arabidopsis Research. Word Scientific, Singapore, pp. 274-289]. Alternative methods are based on the repeated removal of the inflorescences and incubation of the excision site in the center of the rosette with transformed agrobacteria, whereby transformed seeds can likewise be obtained at a later point in time (Chang (1994). Plant J. 5: 551-558; Katavic (1994). Mol Gen Genet, 245: 363-370). However, an especially effective method is the vacuum infiltration method with its modifications such as the “floral dip” method. In the case of vacuum infiltration of Arabidopsis, intact plants under reduced pressure are treated with an agrobacterial suspension [Bechthold, N (1993). C R Acad Sci Paris Life Sci, 316: 1194-1199], while in the case of the “floral dip” method the developing floral tissue is incubated briefly with a surfactant-treated agrobacterial suspension [Clough, S J and Bent A F (1998) The Plant J. 16, 735-743]. A certain proportion of transgenic seeds are harvested in both cases, and these seeds can be distinguished from non-transgenic seeds by growing under the above-described selective conditions. In addition the stable transformation of plastids is of advantages because plastids are inherited maternally is most crops reducing or eliminating the risk of transgene flow through pollen. The transformation of the chloroplast genome is generally achieved by a process which has been schematically displayed in Klaus et al., 2004 [Nature Biotechnology 22 (2), 225-229]. Briefly the sequences to be transformed are cloned together with a selectable marker gene between flanking sequences homologous to the chloroplast genome. These homologous flanking sequences direct site specific integration into the plastome. Plastidal transformation has been described for many different plant species and an overview is given in Bock (2001) Transgenic plastids in basic research and plant biotechnology. J Mol Biol. 2001 Sep. 21; 312 (3):425-38 or Maliga, P (2003) Progress towards commercialization of plastid transformation technology. Trends Biotechnol. 21, 20-28. Further biotechnological progress has recently been reported in form of marker free plastid transformants, which can be produced by a transient co-integrated maker gene (Klaus et al., 2004, Nature Biotechnology 22(2), 225-229). The genetically modified plant cells can be regenerated via all methods with which the skilled worker is familiar. Suitable methods can be found in the abovementioned publications by S. D. Kung and R. Wu, Potrykus or Hofgen and Willmitzer.

[1465] Generally after transformation, plant cells or cell groupings are selected for the presence of one or more markers which are encoded by plant-expressible genes co-transferred with the gene of interest, following which the transformed material is regenerated into a whole plant. To select transformed plants, the plant material obtained in the transformation is, as a rule, subjected to selective conditions so that transformed plants can be distinguished from untransformed plants. For example, the seeds obtained in the above-described manner can be planted and, after an initial growing period, subjected to a suitable selection by spraying. A further possibility consists in growing the seeds, if appropriate after sterilization, on agar plates using a suitable selection agent so that only the transformed seeds can grow into plants. Alternatively, the transformed plants are screened for the presence of a selectable marker such as the ones described above.

[1466] Following DNA transfer and regeneration, putatively transformed plants may also be evaluated, for instance using Southern analysis, for the presence of the gene of interest, copy number and/or genomic organisation. Alternatively or additionally, expression levels of the newly introduced DNA may be monitored using Northern and/or Western analysis, both techniques being well known to persons having ordinary skill in the art.

[1467] The generated transformed plants may be propagated by a variety of means, such as by clonal propagation or classical breeding techniques. For example, a first generation (or T1) transformed plant may be selfed and homozygous second-generation (or T2) transformants selected, and the T2 plants may then further be propagated through classical breeding techniques. The generated transformed organisms may take a variety of forms. For example, they may be chimeras of transformed cells and non-transformed cells; clonal transformants (e.g., all cells transformed to contain the expression cassette); grafts of transformed and untransformed tissues (e.g., in plants, a transformed rootstock grafted to an untransformed scion).

[1468] Preferably, the wild-type or mutated PPO nucleic acid comprises a polynucleotide sequence selected from the group consisting of: a) a polynucleotide encoding a polypeptide as shown in SEQ ID NO: 1, 2, 3, 4, 5, 6, 7, 8, 9, 10, 11, 12, 13, 14, 15, 16, 17, 18, 19, 20, 21, 22, 23, 24, 25, 26, 27, 28, 29, 30, 31, 32, 33, 34, 35, 36, 37, 38, 39, 40, 41, 42, 43, 44, 45, 46, 47, 48, 49, 50, 51, 52, 53, 54, 55, 56, 57, 58, 59, 60, 61, 62, 63, 64, 65, 66, 67, 68, 69, 70, 71, 72, 73, 74, 75, 76, 77, 78, 79, 80, 81, 82, 83, 84, 85, 86, 87, 88, 89, 90, 91, 92, 93, 94, 95, 96, 97, 98, 99, 100, 101, 102, 103, 104, 105, 106, 107, 108, 109, 110, 111, 112, 113, 114, 115, 116, 117, 577, 579, 581, 583, 585, 587, 589, 591, 593, 595, 597, 599, 601, 603, 605, 607, 609, 611, 613, 615, 617, 619, 621, 623, 625, or 627, or a variant or derivative thereof; b) a polynucleotide comprising at least 60 consecutive nucleotides of any of a); and c) a polynucleotide complementary to the polynucleotide of any of a) through b).

[1469] Preferably, the expression of the nucleic acid in the plant results in the plant's increased resistance to phenylpyridine herbicide as compared to a wild type variety of the plant.

[1470] In another embodiment, the invention refers to a plant, preferably a transgenic plant, comprising a plant cell according to the present invention, wherein expression of the nucleic acid in the plant results in the plant's increased resistance to phenylpyridine herbicide as compared to a wild type variety of the plant.

[1471] The plants described herein can be either transgenic crop plants or non-transgenic plants. For the purposes of the invention, “transgenic”, “transgene” or “recombinant” means with regard to, for example, a nucleic acid sequence, an expression cassette, gene construct or a vector comprising the nucleic acid sequence or an organism transformed with the nucleic acid sequences, expression cassettes or vectors according to the invention, all those constructions brought about by recombinant methods in which either
[1472] (a) the nucleic acid sequences encoding proteins useful in the methods of the invention, or
[1473] (b) genetic control sequence(s) which is operably linked with the nucleic acid sequence according to the invention, for example a promoter, or
[1474] (c) a) and b)
   are not located in their natural genetic environment or have been modified by recombinant methods, it being possible for the modification to take the form of, for example, a substitution, addition, deletion, inversion or insertion of one or more nucleotide residues in order to allow for the expression of the mutated PPO of the present invention. The natural genetic environment is understood as meaning the natural genomic or chromosomal locus in the original plant or the presence in a genomic library. In the case of a genomic library, the natural genetic environment of the nucleic acid sequence is preferably retained, at least in part. The environment flanks the nucleic acid sequence at least on one side and has a sequence length of at least 50 bp, preferably at least 500 bp, especially preferably at least 1000 bp, most preferably at least 5000 bp. A naturally occurring expression cassette—for example the naturally occurring combination of the natural promoter of the nucleic acid sequences with the corresponding nucleic acid sequence encoding a polypeptide useful in the methods of the present invention, as defined above—becomes a transgenic expression cassette when this expression cassette is modified by non-natural, synthetic (“artificial”) methods such as, for example, mutagenic treatment. Suitable methods are described, for example, in U.S. Pat. No. 5,565,350 or WO 00/15815.

[1475] A transgenic plant for the purposes of the invention is thus understood as meaning, as above, that the nucleic acids of the invention are not at their natural locus in the genome of said plant, it being possible for the nucleic acids to be expressed homologously or heterologously. However, as mentioned, transgenic also means that, while the nucleic acids according to the invention or used in the inventive method are at their natural position in the genome of a plant, the sequence has been modified with regard to the natural sequence, and/or that the regulatory sequences of the natural sequences have been modified. Transgenic is preferably understood as meaning the expression of the nucleic acids according to the invention at an unnatural locus in the genome, i.e. homologous or, preferably, heterologous expression of the nucleic acids takes place. Preferred transgenic plants are mentioned herein. Furthermore, the term “transgenic” refers to any plant, plant cell, callus, plant tissue, or plant part, that contains all or part of at least one recombinant polynucleotide. In many cases, all or part of the recombinant polynucleotide is stably integrated into a chromosome or stable extra-chromosomal element, so that it is passed on to successive generations. For the purposes of the invention, the term “recombinant polynucleotide” refers to a polynucleotide that has been altered, rearranged, or modified by genetic engineering. Examples include any cloned polynucleotide, or polynucleotides, that are linked or joined to heterologous sequences. The term “recombinant” does not refer to alterations of polynucleotides that result from naturally occurring events, such as spontaneous mutations, or from non-spontaneous mutagenesis followed by selective breeding.

[1476] Plants containing mutations arising due to non-spontaneous mutagenesis and selective breeding are referred to herein as non-transgenic plants and are included in the present invention. In embodiments wherein the plant is transgenic and comprises multiple mutated PPO nucleic acids, the nucleic acids can be derived from different genomes or from the same genome. Alternatively, in embodiments wherein the plant is non-transgenic and comprises multiple mutated PPO nucleic acids, the nucleic acids are located on different genomes or on the same genome. As used herein, “mutagenized” refers to an organism or DNA thereof having alteration(s) in the biomolecular sequence of its native genetic material as compared to the sequence of the genetic material of a corresponding wild-type organism or DNA, wherein the alteration(s) in genetic material were induce and/or selected by human action. Methods of inducing mutations can induce mutations in random positions in the genetic material or can induce mutations in specific locations in the genetic material (i.e., can be directed mutagenesis techniques), such as by use of a genoplasty technique.

[1477] In certain embodiments, the present invention involves herbidicide-resistant plants that are produced by mutation breeding. Such plants comprise a polynucleotide encoding a mutated PPO and are tolerant to one or more phenylpyridine herbicides. Such methods can involve, for example, exposing the plants or seeds to a mutagen, particularly a chemical mutagen such as, for example, ethyl methanesulfonate (EMS) and selecting for plants that have enhanced tolerance to at least one or more phenylpyridine herbicide.

[1478] However, the present invention is not limited to herbicide-tolerant plants that are produced by a mutagenesis method involving the chemical mutagen EMS. Any mutagenesis method known in the art may be used to produce the herbicide-resistant plants of the present invention. Such mutagenesis methods can involve, for example, the use of any one or more of the following mutagens: radiation, such as X-rays, Gamma rays (e.g., cobalt 60 or cesium 137), neutrons, (e.g., product of nuclear fission by uranium 235 in an atomic reactor), Beta radiation (e.g., emitted from radioisotopes such as phosphorus 32 or carbon 14), and ultraviolet radiation (preferably from 2500 to 2900 nm), and chemical mutagens such as base analogues (e.g., 5-bromo-uracil), related compounds (e.g., 8-ethoxy caffeine), antibiotics (e.g., streptonigrin), alkylating agents (e.g., sulfur mustards, nitrogen mustards, epoxides, ethylenamines, sulfates, sulfonates, sulfones, lactones), azide, hydroxylamine, nitrous acid, or acridines. Herbicide-resistant plants can also be produced by using tissue culture methods to select for plant cells comprising herbicide-resistance mutations and then regenerating herbicide-resistant plants therefrom. See, for example, U.S. Pat. Nos. 5,773,702 and 5,859,348, both of which are herein incorporated in their entirety by reference. Further details of mutation breeding can be found in “Principals of Cultivar Development” Fehr, 1993 Macmillan Publishing Company the disclosure of which is incorporated herein by reference

[1479] In addition to the definition above, the term “plant” is intended to encompass crop plants at any stage of maturity or development, as well as any tissues or organs (plant parts) taken or derived from any such plant unless otherwise clearly indicated by context. Plant parts include, but are not limited to, stems, roots, flowers, ovules, stamens, leaves, embryos, meristematic regions, callus tissue, anther cultures, gametophytes, sporophytes, pollen, microspores, protoplasts, and the like.

[1480] The plant of the present invention comprises at least one mutated PPO nucleic acid or over-expressed wild-type PPO nucleic acid, and has increased tolerance to a phenylpyridine herbicide as compared to a wild-type variety of the plant. It is possible for the plants of the present invention to have multiple wild-type or mutated PPO nucleic acids from different genomes since these plants can contain more than one genome. For example, a plant contains two genomes, usually referred to as the A and B genomes. Because PPO is a required metabolic enzyme, it is assumed that each genome has at least one gene coding for the PPO enzyme (i.e. at least one PPO gene). As used herein, the term “PPO gene locus” refers to the position of an PPO gene on a genome, and the terms “PPO gene” and “PPO nucleic acid” refer to a nucleic acid encoding the PPO enzyme. The PPO nucleic acid on each genome differs in its nucleotide sequence from an PPO nucleic acid on another genome. One of skill in the art can determine the genome of origin of each PPO nucleic acid through genetic crossing and/or either sequencing methods or exonuclease digestion methods known to those of skill in the art.

[1481] The present invention includes plants comprising one, two, three, or more mutated PPO alleles, wherein the plant has increased tolerance to a phenylpyridine herbicide as compared to a wild-type variety of the plant. The mutated PPO alleles can comprise a nucleotide sequence selected from the group consisting of a polynucleotide encoding a polypeptide as defined in SEQ ID NO: 1, 2, 3, 4, 5, 6, 7, 8, 9, 10, 11, 12, 13, 14, 15, 16, 17, 18, 19, 20, 21, 22, 23, 24, 25, 26, 27, 28, 29, 30, 31, 32, 33, 34, 35, 36, 37, 38, 39, 40, 41, 42, 43, 44, 45, 46, 47, 48, 49, 50, 51, 52, 53, 54, 55, 56, 57, 58, 59, 60, 61, 62, 63, 64, 65, 66, 67, 68, 69, 70, 71, 72, 73, 74, 75, 76, 77, 78, 79, 80, 81, 82, 83, 84, 85, 86, 87, 88, 89, 90, 91, 92, 93, 94, 95, 96, 97, 98, 99, 100, 101, 102, 103, 104, 105, 106, 107, 108, 109, 110, 111, 112, 113, 114, 115, 116, 117, 577, 579, 581, 583, 585, 587, 589, 591, 593, 595, 597, 599, 601, 603, 605, 607, 609, 611, 613, 615, 617, 619, 621, 623, 625, or 627, 265, 266, 267, 268, 269, 270, 271, 272, 273, 274, 275, 276, 277, 278, 279, 280, 281, 282, 283, 284, 285, 286, 287, 288, 289, 290, 291, 292, 293, 294, 295, 296, 297, 298, 299, 300, 301, 302, 303, 304, 305, 306, 307, 308, 309, 310, 311, 312, 313, 314, 315, 316, 317, 318, 319, 320, 321, 322, 323, 324, 325, 326, 327328, 329, 330, 331, 332, 333, 334, 335, 336, 337, 338, 339, 340, 341, 342, 343, 344, 345, 346, 347, 348, 349, 350, 351, 352, 353, 354, 355, 356, 357, 358, 359, 360, 361, 362, 363, 364, 365, 366, 367, 368, 369, 370, 371, 372, 373, 374, 375, 376, 377, 378, 379, 380, 381, 382, 383, 384, 385, 386, 387, 388, 389, 390, 391, 392, 393, 394, 395, 396, 397, 398, 399, 400, 401, 402, 403, 404, 405, 406, 407, 408, 409, 410, 411, 412, 413, 414, 415, 416, 417, 418, 419, 420, 421, 422, 423, 424, 425, 426, 427, 428, 429, 430, 431, 432, 433, 434, 435, 436, 437, 438, 439, 440, 441, 442, 443, 444, 445, 446, 447, 448, 449, 450, 451, 452, 453, 454, 455, 456, 457, 458, 459, 460, 461, 462, 463, 464, 465, 466, 467, 468, 469, 470, 471, 472, 473, 474, 475, 476, 477, 478, 479, 480, 481, 482, 483, 484, 485, 486, 487, 488, 489, 490, 491, 492, 493, 494, 495, 496, 497, 498, 499, 500, 501, 502, 503, 504, 505, 506, 507, 508, 509, 510, 511, 512, 513, 514, 515, 516, 517, 518, 519, 520, 521, 522, 523, 524, 525, 526, 527, 528, 529, 530, 531, 532, 533, 534, 535, 536, 537, 538, 539, 540, 541, 542, 543, 544, 545, 546, 547, 548, 549, 550, 551, 552, 553, 554, 555, 556, 557, 558, 559, 560, 561, 562, 563, 564, 565, or a variant or derivative, homologue, orthologue, paralogue thereof, a polynucleotide comprising at least 60 consecutive nucleotides of any of the aforementioned polynucleotides; and a polynucleotide complementary to any of the aforementioned polynucleotides.

[1482] “Alleles” or “allelic variants” are alternative forms of a given gene, located at the same chromosomal position. Allelic variants encompass Single Nucleotide Polymorphisms (SNPs), as well as Small Insertion/Deletion Polymorphisms (INDELs). The size of INDELs is usually less than 100 bp. SNPs and INDELs form the largest set of sequence variants in naturally occurring polymorphic strains of most organisms

[1483] The term “variety” refers to a group of plants within a species defined by the sharing of a common set of characteristics or traits accepted by those skilled in the art as sufficient to distinguish one cultivar or variety from another cultivar or variety. There is no implication in either term that all plants of any given cultivar or variety will be genetically identical at either the whole gene or molecular level or that any given plant will be homozygous at all loci. A cultivar or variety is considered “true breeding” for a particular trait if, when the true-breeding cultivar or variety is self-pollinated, all of the progeny contain the trait. The terms “breeding line” or “line” refer to a group of plants within a cultivar defined by the sharing of a common set of characteristics or traits accepted by those skilled in the art as sufficient to distinguish one breeding line or line from another breeding line or line. There is no implication in either term that all plants of any given breeding line or line will be genetically identical at either the whole gene or molecular level or that any given plant will be homozygous at all loci. A breeding line or line is considered “true breeding” for a particular trait if, when the true-breeding line or breeding line is self-pollinated, all of the progeny contain the trait. In the present invention, the trait arises from a mutation in a PPO gene of the plant or seed.

[1484] In some embodiments, traditional plant breeding is employed whereby the phenylpyridine herbicides-tolerant trait is introduced in the progeny plant resulting therefrom. In one embodiment, the present invention provides a method for producing a phenylpyridine herbicides-tolerant progeny plant, the method comprising: crossing a parent plant with a phenylpyridine herbicides-tolerant plant to introduce the phenylpyridine herbicides-tolerance characteristics of the phenylpyridine herbicides-tolerant plant into the germplasm of the progeny plant, wherein the progeny plant has increased tolerance to the phenylpyridine herbicides relative to the parent plant. In other embodiments, the method further comprises the step of introgressing the phenylpyridine herbicides-tolerance characteristics through traditional plant breeding techniques to obtain a descendent plant having the phenylpyridine herbicides-tolerance characteristics.

[1485] The herbicide-resistant plants of the invention that comprise polynucleotides encoding mutated PPO polypeptides also find use in methods for increasing the herbicide-resistance of a plant through conventional plant breeding involving sexual reproduction. The methods comprise crossing a first plant that is a herbicide-resistant plant of the invention to a second plant that may or may not be resistant to the same herbicide or herbicides as the first plant or may be resistant to different herbicide or herbicides than the first plant. The second plant can be any plant that is capable of producing viable progeny plants (i.e., seeds) when crossed with the first plant. Typically, but not necessarily, the first and second plants are of the same species. The methods can optionally involve selecting for progeny plants that comprise the mutated PPO polypeptides of the first plant and the herbicide resistance characteristics of the second plant. The progeny plants produced by this method of the present invention have increased resistance to a herbicide when compared to either the first or second plant or both. When the first and second plants are resistant to different herbicides, the progeny plants will have the combined herbicide tolerance characteristics of the first and second plants. The methods of the invention can further involve one or more generations of backcrossing the progeny plants of the first cross to a plant of the same line or genotype as either the first or second plant. Alternatively, the progeny of the first cross or any subsequent cross can be crossed to a third plant that is of a different line or genotype than either the first or second plant. The present invention also provides plants, plant organs, plant tissues, plant cells, seeds, and non-human host cells that are transformed with the at least one polynucleotide molecule, expression cassette, or transformation vector of the invention. Such transformed plants, plant organs, plant tissues, plant cells, seeds, and non-human host cells have enhanced tolerance or resistance to at least one herbicide, at levels of the herbicide that kill or inhibit the growth of an untransformed plant, plant tissue, plant cell, or non-human host cell, respectively. Preferably, the transformed plants, plant tissues, plant cells, and seeds of the invention are Arabidopsis thaliana and crop plants.

[1486] In other aspects, plants of the invention include those plants which, in addition to being tolerant to phenylpyridine herbicides, have been subjected to further genetic modifications by breeding, mutagenesis or genetic engineering, e.g. have been rendered tolerant to applications of specific other classes of herbicides, such as AHAS inhibitors; auxinic herbicides; bleaching herbicides such as hydroxyphenylpyruvate dioxygenase (HPPD) inhibitors or phytoene desaturase (PDS) inhibitors; EPSPS inhibitors such as glyphosate; glutamine synthetase (GS) inhibitors such as glufosinate; lipid biosynthesis inhibitors such as acetyl CoA carboxylase (ACCase) inhibitors; or oxynil {i.e. bromoxynil or ioxynil) herbicides as a result of conventional methods of breeding or genetic engineering, Thus, phenylpyridine herbicides-tolerant plants of the invention can be made resistant to multiple classes of herbicides through multiple genetic modifications, such as resistance to both glyphosate and glufosinate or to both glyphosate and a herbicide from another class such as HPPD inhibitors, AHAS inhibitors, or ACCase inhibitors. These herbicide resistance technologies are, for example, described in Pest Management Science (at volume, year, page): 61, 2005, 246; 61, 2005, 258; 61, 2005, 277; 61, 2005, 269; 61, 2005, 286; 64, 2008, 326; 64, 2008, 332; Weed Science 57, 2009, 108; Australian Journal of Agricultural Research 58, 2007, 708; Science 316, 2007, 1185; and references quoted therein. For example, phenylpyridine herbicides-tolerant plants of the invention, in some embodiments, may be tolerant to ACCase inhibitors, such as “dims” {e.g., cycloxydim, sethoxydim, clethodim, or tepraloxydim), “fops” {e.g., clodinafop, diclofop, fluazifop, haloxyfop, or quizalofop), and “dens” (such as pinoxaden); to auxinic herbicides, such as dicamba; to EPSPS inhibitors, such as glyphosate; to other PPO inhibitors; and to GS inhibitors, such as glufosinate.

[1487] In addition to these classes of inhibitors, phenylpyridine herbicides-tolerant plants of the invention may also be tolerant to herbicides having other modes of action, for example, chlorophyll/carotenoid pigment inhibitors, cell membrane disrupters, photosynthesis inhibitors, cell division inhibitors, root inhibitors, shoot inhibitors, and combinations thereof.

[1488] Such tolerance traits may be expressed, e.g.: as mutant or wildtype PPO proteins, as mutant AHASL proteins, mutant ACCase proteins, mutant EPSPS proteins, or mutant glutamine synthetase proteins; or as mutant native, inbred, or transgenic aryloxyalkanoate dioxygenase (AAD or DHT), haloarylnitrilase (BXN), 2,2-dichloropropionic acid dehalogenase (DEH), glyphosate-N-acetyltransferase (GAT), glyphosate decarboxylase (GDC), glyphosate oxidoreductase (GOX), glutathione-S-transferase (GST), phosphinothricin acetyltransferase (PAT or bar), or CYP450s proteins having an herbicide-degrading activity.

[1489] phenylpyridine herbicides-tolerant plants hereof can also be stacked with other traits including, but not limited to, pesticidal traits such as Bt Cry and other proteins having pesticidal activity toward coleopteran, lepidopteran, nematode, or other pests; nutrition or nutraceutical traits such as modified oil content or oil profile traits, high protein or high amino acid concentration traits, and other trait types known in the art.

[1490] Furthermore, in other embodiments, phenylpyridine herbicides-tolerant plants are also covered which are, by the use of recombinant DNA techniques and/or by breeding and/or otherwise selected for such characteristics, rendered able to synthesize one or more insecticidal proteins, especially those known from the bacterial genus Bacillus, particularly from Bacillus thuringiensis, such as [delta]-endotoxins, e.g. CryIA(b), CryIA(c), CryIF, CryIF(a2), CryIIA(b), CryIIIA, CryIIIB(bI) or Cry9c; vegetative insecticidal proteins (VIP), e.g. VIP1, VIP2, VIP3 or VIP3A; insecticidal proteins of bacteria colonizing nematodes, e.g. Photorhabdus spp. or Xenorhabdus spp.; toxins produced by animals, such as scorpion toxins, arachnid toxins, wasp toxins, or other insect-specific neurotoxins; toxins produced by fungi, such streptomycete toxins; plant lectins, such as pea or barley lectins; agglutinins; proteinase inhibitors, such as trypsin inhibitors, serine protease inhibitors, patatin, cystatin or papain inhibitors; ribosome-inactivating proteins (RIP), such as ricin, maize-RIP, abrin, luffin, saporin or bryodin; steroid metabolism enzymes, such as 3-hydroxy-steroid oxidase, ecdysteroid-IDP-glycosyl-transferase, cholesterol oxidases, ecdysone inhibitors or HMG-CoA-reductase; ion channel blockers, such as blockers of sodium or calcium channels; juvenile hormone esterase; diuretic hormone receptors (helicokinin receptors); stilben synthase, bibenzyl synthase, chitinases or glucanases. In the context of the present invention these insecticidal proteins or toxins are to be understood expressly also as pre-toxins, hybrid proteins, truncated or otherwise modified proteins. Hybrid proteins are characterized by a new combination of protein domains, (see, e.g. WO 02/015701). Further examples of such toxins or genetically modified plants capable of synthesizing such toxins are disclosed, e.g., in EP-A 374 753, WO 93/007278, WO 95/34656, EP-A 427 529, EP-A 451 878, WO 03/18810 und WO 03/52073. The methods for producing such genetically modified plants are generally known to the person skilled in the art and are described, e.g. in the publications mentioned above. These insecticidal proteins contained in the genetically modified plants impart to the plants producing these proteins tolerance to harmful pests from all taxonomic groups of arthropods, especially to beetles (Coeloptera), two-winged insects (Diptera), and moths (Lepidoptera) and to nematodes (Nematoda).

[1491] In some embodiments, expression of one or more protein toxins (e.g., insecticidal proteins) in the phenylpyridine herbicides-tolerant plants is effective for controlling organisms that include, for example, members of the classes and orders: Coleoptera such as the American bean weevil Acanthoscelides obtectus; the leaf beetle Agelastica alni; click beetles (Agriotes lineatus, Agriotes obscurus, Agriotes bicolor); the grain beetle Ahasverus advena; the summer schafer Amphimallon solstitialis; the furniture beetle Anobium punctatum; Anthonomus spp. (weevils); the Pygmy mangold beetle Atomaria linearis; carpet beetles (Anthrenus spp., Attagenus spp.); the cowpea weevil Callosobruchus maculates; the fried fruit beetle Carpophilus hemipterus; the cabbage seedpod weevil Ceutorhynchus assimilis; the rape winter stem weevil Ceutorhynchus picitarsis; the wireworms Conoderus vespertinus and Conoderus falli; the banana weevil Cosmopolites sordidus; the New Zealand grass grub Costelytra zealandica; the June beetle Cotinis nitida; the sunflower stem weevil Cylindrocopturus adspersus; the larder beetle Dermestes lardarius; the corn rootworms Diabrotica virgifera, Diabrotica virgifera virgifera, and Diabrotica barberi; the Mexican bean beetle Epilachna varivestis; the old house borer Hylotropes bajulus; the lucerne weevil Hypera postica; the shiny spider beetle Gibbium psylloides; the cigarette beetle Lasioderma serricorne; the Colorado potato beetle Leptinotarsa decemlineata; Lyctus beetles {Lyctus spp., the pollen beetle Meligethes aeneus; the common cockshafer Melolontha melolontha; the American spider beetle Mezium americanum; the golden spider beetle Niptus hololeuc s; the grain beetles Oryzaephilus surinamensis and Oryzaephilus Mercator; the black vine weevil Otiorhynchus sulcatus; the mustard beetle Phaedon cochleariae, the crucifer flea beetle Phyllotreta cruciferae; the striped flea beetle Phyllotreta striolata; the cabbage steam flea beetle Psylliodes chrysocephala; Ptinus spp. (spider beetles); the lesser grain borer Rhizopertha dominica; the pea and been weevil Sitona lineatus; the rice and granary beetles Sitophilus oryzae and Sitophilus granaries; the red sunflower seed weevil Smicronyx fulvus; the drugstore beetle Stegobium paniceum; the yellow mealworm beetle Tenebrio molitor, the flour beetles Tribolium castaneum and Tribolium confusum; warehouse and cabinet beetles {Trogoderma spp.); the sunflower beetle Zygogramma exclamationis; Dermaptera (earwigs) such as the European earwig Forficula auricularia and the striped earwig Labidura riparia; Dictyoptera such as the oriental cockroach Blatta orientalis; the greenhouse millipede Oxidus gracilis; the beet fly Pegomyia betae; the frit fly Oscinella frit; fruitflies (Dacus spp., Drosophila spp.); Isoptera (termites) including species from the familes Hodotermitidae, Kalotermitidae, Mastotermitidae, Rhinotermitidae, Serritermitidae, Termitidae, Termopsidae; the tarnished plant bug Lygus lineolaris; the black bean aphid Aphis fabae; the cotton or melon aphid Aphis gossypii; the green apple aphid Aphis pomi; the citrus spiny whitefly Aleurocanthus spiniferus; the sweet potato whitefly Bemesia tabaci; the cabbage aphid Brevicoryne brassicae; the pear psylla Cacopsylla pyricola; the currant aphid Cryptomyzus ribis; the grape phylloxera Daktulosphaira vitifoliae; the citrus psylla Diaphorina citri; the potato leafhopper Empoasca fabae; the bean leafhopper Empoasca Solana; the vine leafhopper Empoasca vitis; the woolly aphid Eriosoma lanigerum; the European fruit scale Eulecanium corni; the mealy plum aphid Hyalopterus arundinis; the small brown planthopper Laodelphax striatellus; the potato aphid Macrosiphum euphorbiae; the green peach aphid Myzus persicae; the green rice leafhopper Nephotettix cinticeps; the brown planthopper Nilaparvata lugens; the hop aphid Phorodon humuli; the bird-cherry aphid Rhopalosiphum padi; the grain aphid Sitobion avenae; Lepidoptera such as Adoxophyes orana (summer fruit tortrix moth); Archips podana (fruit tree tortrix moth); Bucculatrix pyrivorella (pear leafminer); Bucculatrix thurberiella (cotton leaf perforator); Bupalus piniarius (pine looper); Carpocapsa pomonella (codling moth); Chilo suppressalis (striped rice borer); Choristoneura fumiferana (eastern spruce budworm); Cochylis hospes (banded sunflower moth); Diatraea grandiosella (southwestern corn borer); Eupoecilia ambiguella (European grape berry moth); Helicoverpa armigera (cotton bollworm); Helicoverpa zea (cotton bollworm); Heliothis vires cens (tobacco budworm), Homeosoma electellum (sunflower moth); Homona magnanima (oriental tea tree tortrix moth); Lithocolletis blancardella (spotted tentiform leafminer); Lymantria dispar (gypsy moth); Malacosoma neustria (tent caterpillar); Mamestra brassicae (cabbage armyworm); Mamestra configurata (Bertha armyworm); Operophtera brumata (winter moth); Ostrinia nubilalis (European corn borer), Panolis flammea (pine beauty moth), Phyllocnistis citrella (citrus leafminer); Pieris brassicae (cabbage white butterfly); Rachiplusia ni (soybean looper); Spodoptera exigua (beet armywonn); Spodoptera littoralis (cotton leafworm); Sylepta derogata (cotton leaf roller); Trichoplusia ni (cabbage looper); Orthoptera such as the common cricket Acheta domesticus, tree locusts (Anacridium spp.), the migratory locust Locusta migratoria, the twostriped grasshopper Melanoplus bivittatus, the differential grasshopper Melanoplus differ entialis, the redlegged grasshopper Melanoplus femurrubrum, the migratory grasshopper Melanoplus sanguinipes, the northern mole cricket Neocurtilla hexadectyla, the red locust Nomadacris septemfasciata, the shortwinged mole cricket Scapteriscus abbreviatus, the southern mole cricket Scapteriscus borellii, the tawny mole cricket Scapteriscus vicinus, and the desert locust Schistocerca gregaria; Symphyla such as the garden symphylan Scutigerella immaculata; Thysanoptera such as the tobacco thrips Frankliniella fusca, the flower thrips Frankliniella intonsa, the western flower thrips Frankliniella occidentalism the cotton bud thrips Frankliniella schultzei, the banded greenhouse thrips Hercinothrips femoralis, the soybean thrips Neohydatothrips variabilis, Kelly's citrus thrips Pezothrips kellyanus, the avocado thrips Scirtothrips perseae, the melon thrips Thrips palmi, and the onion thrips Thrips tabaci; and the like, and combinations comprising one or more of the foregoing organisms.

[1492] In some embodiments, expression of one or more protein toxins (e.g., insecticidal proteins) in the phenylpyridine herbicides-tolerant plants is effective for controlling flea beetles, i.e. members of the flea beetle tribe of family Chrysomelidae, preferably against Phyllotreta spp., such as Phyllotreta cruciferae and/or Phyllotreta triolata. In other embodiments, expression of one or more protein toxins {e.g., insecticidal proteins) in the phenylpyridine herbicides-tolerant plants is effective for controlling cabbage seedpod weevil, the Bertha armyworm, Lygus bugs, or the diamondback moth.

[1493] Furthermore, in one embodiment, phenylpyridine herbicides-tolerant plants are also covered which are, e.g. by the use of recombinant DNA techniques and/or by breeding and/or otherwise selected for such traits, rendered able to synthesize one or more proteins to increase the resistance or tolerance of those plants to bacterial, viral or fungal pathogens. The methods for producing such genetically modified plants are generally known to the person skilled in the art.

[1494] Furthermore, in another embodiment, phenylpyridine herbicides-tolerant plants are also covered which are, e.g. by the use of recombinant DNA techniques and/or by breeding and/or otherwise selected for such traits, rendered able to synthesize one or more proteins to increase the productivity (e.g. oil content), tolerance to drought, salinity or other growth-limiting environmental factors or tolerance to pests and fungal, bacterial or viral pathogens of those plants.

[1495] Furthermore, in other embodiments, phenylpyridine herbicides-tolerant plants are also covered which are, e.g. by the use of recombinant DNA techniques and/or by breeding and/or otherwise selected for such traits, altered to contain a modified amount of one or more substances or new substances, for example, to improve human or animal nutrition, e.g. oil crops that produce health-promoting long-chain omega-3 fatty acids or unsaturated omega-9 fatty acids (e.g. Nexera® rape, Dow Agro Sciences, Canada).

[1496] Furthermore, in some embodiments, phenylpyridine herbicides-tolerant plants are also covered which are, e.g. by the use of recombinant DNA techniques and/or by breeding and/or otherwise selected for such traits, altered to contain increased amounts of vitamins and/or minerals, and/or improved profiles of nutraceutical compounds.

[1497] In one embodiment, phenylpyridine herbicides-tolerant plants of the present invention, relative to a wild-type plant, comprise an increased amount of, or an improved profile of, a compound selected from the group consisting of: glucosinolates (e.g., glucoraphanin (4-methylsulfinylbutyl-glucosinolate), sulforaphane, 3-indolylmethyl-glucosinolate(glucobrassicin), I-methoxy-3-indolylmethyl-glucosinolate (neoglucobrassicin)); phenolics (e.g., flavonoids (e.g., quercetin, kaempferol), hydroxycinnamoyl derivatives (e.g., 1,2,2′-trisinapoylgentiobiose, 1,2-diferuloylgentiobiose, I,2′-disinapoyl-2-feruloylgentiobiose, 3-0-caffeoyl-quinic (neochlorogenic acid)); and vitamins and minerals (e.g., vitamin C, vitamin E, carotene, folic acid, niacin, riboflavin, thiamine, calcium, iron, magnesium, potassium, selenium, and zinc).

[1498] In another embodiment, phenylpyridine herbicides-tolerant plants of the present invention, relative to a wild-type plant, comprise an increased amount of, or an improved profile of, a compound selected from the group consisting of: progoitrin; isothiocyanates; indoles (products of glucosinolate hydrolysis); glutathione; carotenoids such as beta-carotene, lycopene, and the xanthophyll carotenoids such as lutein and zeaxanthin; phenolics comprising the flavonoids such as the flavonols (e.g. quercetin, rutin), the flavans/tannins (such as the procyanidins comprising coumarin, proanthocyanidins, catechins, and anthocyanins); flavones; phytoestrogens such as coumestans, lignans, resveratrol, isoflavones e.g. genistein, daidzein, and glycitein; resorcyclic acid lactones; organosulphur compounds; phytosterols; terpenoids such as carnosol, rosmarinic acid, glycyrrhizin and saponins; chlorophyll; chlorphyllin, sugars, anthocyanins, and vanilla. In other embodiments, phenylpyridine herbicides-tolerant plants of the present invention, relative to a wild-type plant, comprise an increased amount of, or an improved profile of, a compound selected from the group consisting of: vincristine, vinblastine, taxanes (e.g., taxol (paclitaxel), baccatin III, 10-desacetylbaccatin III, 10-desacetyl taxol, xylosyl taxol, 7-epitaxol, 7-epibaccatin III, 10-desacetylcephalomannine, 7-epicephalomannine, taxotere, cephalomannine, xylosyl cephalomannine, taxagifine, 8-benxoyloxy taxagifine, 9-acetyloxy taxusin, 9-hydroxy taxusin, taiwanxam, taxane Ia, taxane Ib, taxane Ic, taxane Id, GMP paclitaxel, 9-dihydro 13-acetylbaccatin III, 10-desacetyl-7-epitaxol, tetrahydrocannabinol (THC), cannabidiol (CBD), genistein, diadzein, codeine, morphine, quinine, shikonin, ajmalacine, serpentine, and the like.

[1499] It is to be understood that the plant of the present invention can comprise a wild type PPO nucleic acid in addition to a mutated PPO nucleic acid. It is contemplated that the phenylpyridine herbicide tolerant lines may contain a mutation in only one of multiple PPO isoenzymes. Therefore, the present invention includes a plant comprising one or more mutated PPO nucleic acids in addition to one or more wild type PPO nucleic acids.

[1500] In another embodiment, the invention refers to a seed produced by a transgenic plant comprising a plant cell of the present invention, wherein the seed is true breeding for an increased resistance to a phenylpyridine herbicide as compared to a wild type variety of the seed.

[1501] In another embodiment, the invention refers to a method of producing a transgenic plant cell with an increased resistance to a phenylpyridine herbicide as compared to a wild type variety of the plant cell comprising, transforming the plant cell with an expression cassette comprising a mutated PPO nucleic acid.

[1502] In another embodiment, the invention refers to a method of producing a transgenic plant comprising, (a) transforming a plant cell with an expression cassette comprising a mutated PPO nucleic acid, and (b) generating a plant with an increased resistance to phenylpyridine herbicide from the plant cell.

[1503] Consequently, mutated PPO nucleic acids of the invention are provided in expression cassettes for expression in the plant of interest. The cassette will include regulatory sequences operably linked to a mutated PPO nucleic acid sequence of the invention. The term “regulatory element” as used herein refers to a polynucleotide that is capable of regulating the transcription of an operably linked polynucleotide. It includes, but not limited to, promoters, enhancers, introns, 5′ UTRs, and 3′ UTRs. By “operably linked” is intended a functional linkage between a promoter and a second sequence, wherein the promoter sequence initiates and mediates transcription of the DNA sequence corresponding to the second sequence. Generally, operably linked means that the nucleic acid sequences being linked are contiguous and, where necessary to join two protein coding regions, contiguous and in the same reading frame. The cassette may additionally contain at least one additional gene to be cotransformed into the organism. Alternatively, the additional gene(s) can be provided on multiple expression cassettes.

[1504] In a preferred embodiment, the expression cassette comprises the sequence of SEQ ID NO: 240, 241, 242, 243, 244, 245, 246, 247, 248, 249, 250, 251, 252, 253, 254, 255, 256, 257, 258, 259, 260, 261, or 262.

[1505] Such an expression cassette is provided with a plurality of restriction sites for insertion of the mutated PPO nucleic acid sequence to be under the transcriptional regulation of the regulatory regions. The expression cassette may additionally contain selectable marker genes.

[1506] The expression cassette of the present invention will include in the 5′-3′ direction of transcription, a transcriptional and translational initiation region (i.e., a promoter), a mutated PPO encoding nucleic acid sequence of the invention, and a transcriptional and translational termination region (i.e., termination region) functional in plants. The promoter may be native or analogous, or foreign or heterologous, to the plant host and/or to the mutated PPO nucleic acid sequence of the invention. Additionally, the promoter may be the natural sequence or alternatively a synthetic sequence. Where the promoter is “foreign” or “heterologous” to the plant host, it is intended that the promoter is not found in the native plant into which the promoter is introduced. Where the promoter is “foreign” or “heterologous” to the mutated PPO nucleic acid sequence of the invention, it is intended that the promoter is not the native or naturally occurring promoter for the operably linked mutated PPO nucleic acid sequence of the invention. As used herein, a chimeric gene comprises a coding sequence operably linked to a transcription initiation region that is heterologous to the coding sequence.

[1507] While it may be preferable to express the mutated PPO nucleic acids of the invention using heterologous promoters, the native promoter sequences may be used. Such constructs would change expression levels of the mutated PPO protein in the plant or plant cell. Thus, the phenotype of the plant or plant cell is altered.

[1508] The termination region may be native with the transcriptional initiation region, may be native with the operably linked mutated PPO sequence of interest, may be native with the plant host, or may be derived from another source (i.e., foreign or heterologous to the promoter, the mutated PPO nucleic acid sequence of interest, the plant host, or any combination thereof). Convenient termination regions are available from the Ti-plasmid of A. tumefaciens, such as the octopine synthase and nopaline synthase termination regions. See also Guerineau et al. (1991) Mol. Gen. Genet. 262: 141-144; Proudfoot (1991) Cell 64:671-674; Sanfacon et al. (1991) Genes Dev. 5: 141-149; Mogen et al. (1990) Plant Cell 2: 1261-1272; Munroe et al. (1990) Gene 91: 151-158; Ballast al. (1989) Nucleic Acids Res. 17:7891-7903; and Joshi et al. (1987) Nucleic Acid Res. 15:9627-9639. Where appropriate, the gene(s) may be optimized for increased expression in the transformed plant. That is, the genes can be synthesized using plant-preferred codons for improved expression. See, for example, Campbell and Gowri (1990) Plant Physiol. 92: 1-11 for a discussion of host-preferred codon usage. Methods are available in the art for synthesizing plant-preferred genes. See, for example, U.S. Pat. Nos. 5,380,831, and 5,436,391, and Murray et al. (1989) Nucleic Acids Res. 17:477-498, herein incorporated by reference.

[1509] Additional sequence modifications are known to enhance gene expression in a cellular host. These include elimination of sequences encoding spurious polyadenylation signals, exon-intron splice site signals, transposon-like repeats, and other such well-characterized sequences that may be deleterious to gene expression. The G-C content of the sequence may be adjusted to levels average for a given cellular host, as calculated by reference to known genes expressed in the host cell. When possible, the sequence is modified to avoid predicted hairpin secondary mRNA structures. Nucleotide sequences for enhancing gene expression can also be used in the plant expression vectors. These include the introns of the maize Adhl, intronl gene (Callis et al. Genes and Development 1: 1183-1200, 1987), and leader sequences, (W-sequence) from the Tobacco Mosaic virus (TMV), Maize Chlorotic Mottle Virus and Alfalfa Mosaic Virus (Gallie et al. Nucleic Acid Res. 15:8693-8711, 1987 and Skuzeski et al. Plant Mol. Biol. 15:65-79, 1990). The first intron from the shrunken-1 locus of maize, has been shown to increase expression of genes in chimeric gene constructs. U.S. Pat. Nos. 5,424,412 and 5,593,874 disclose the use of specific introns in gene expression constructs, and Gallie et al. (Plant Physiol. 106:929-939, 1994) also have shown that introns are useful for regulating gene expression on a tissue specific basis. To further enhance or to optimize mutated PPO gene expression, the plant expression vectors of the invention may also contain DNA sequences containing matrix attachment regions (MARs). Plant cells transformed with such modified expression systems, then, may exhibit overexpression or constitutive expression of a nucleotide sequence of the invention.

[1510] The expression cassettes of the present invention may additionally contain 5′ leader sequences in the expression cassette construct. Such leader sequences can act to enhance translation. Translation leaders are known in the art and include: picornavirus leaders, for example, EMCV leader (Encephalomyocarditis 5′ noncoding region) (Elroy-Stein et al. (1989) Proc. Natl. Acad. ScL USA 86:6126-6130); potyvirus leaders, for example, TEV leader (Tobacco Etch Virus) (Gallie et al. (1995) Gene 165(2):233-238), MDMV leader (Maize Dwarf Mosaic Virus) (Virology 154:9-20), and human immunoglobulin heavy-chain binding protein (BiP) (Macejak et al. (1991) Nature 353:90-94); untranslated leader from the coat protein mRNA of alfalfa mosaic virus (AMV RNA 4) (Jobling et al. (1987) Nature 325:622-625); tobacco mosaic virus leader (TMV) (Gallie et al. (1989) in Molecular Biology of RNA, ed. Cech (Liss, New York), pp. 237-256); and maize chlorotic mottle virus leader (MCMV) (Lommel et al. (1991) Virology 81:382-385). See also, Della-Cioppa et al. (1987) Plant Physiol. 84:965-968. Other methods known to enhance translation can also be utilized, for example, introns, and the like.

[1511] In preparing the expression cassette, the various DNA fragments may be manipulated, so as to provide for the DNA sequences in the proper orientation and, as appropriate, in the proper reading frame. Toward this end, adapters or linkers may be employed to join the DNA fragments or other manipulations may be involved to provide for convenient restriction sites, removal of superfluous DNA, removal of restriction sites, or the like. For this purpose, in vitro mutagenesis, primer repair, restriction, annealing, resubstitutions, e.g., transitions and trans versions, may be involved.

[1512] A number of promoters can be used in the practice of the invention. The promoters can be selected based on the desired outcome. The nucleic acids can be combined with constitutive, tissue-preferred, or other promoters for expression in plants. Such constitutive promoters include, for example, the core promoter of the Rsyn7 promoter and other constitutive promoters disclosed in WO 99/43838 and U.S. Pat. No. 6,072,050; the core CaMV 35S promoter (Odell et al. (1985) Nature 313:810-812); rice actin (McElroy et al. (1990) Plant Cell 2: 163-171); ubiquitin (Christensen et al. (1989) Plant Mol. Biol. 12:619-632 and Christensen et al. (1992) Plant Mol. Biol. 18:675-689); pEMU (Last et al. (1991) Theor. Appl. Genet. 81:581-588); MAS (Velten et al. (1984) EMBO J. 3:2723-2730); ALS promoter (U.S. Pat. No. 5,659,026), and the like. Other constitutive promoters include, for example, U.S. Pat. Nos. 5,608,149; 5,608,144; 5,604,121; 5,569,597; 5,466,785; 5,399,680; 5,268,463; 5,608,142; and 6,177,611.

[1513] Tissue-preferred promoters can be utilized to target enhanced mutated PPO expression within a particular plant tissue. Such tissue-preferred promoters include, but are not limited to, leaf-preferred promoters, root-preferred promoters, seed-preferred promoters, and stem-preferred promoters. Tissue-preferred promoters include Yamamoto et al. (1997) Plant J. 12(2):255-265; Kawamata et al. (1997) Plant Cell Physiol. 38(7):792-803; Hansen et al. (1997) Mol. Gen Genet. 254(3):337-343; Russell et al. (1997) Transgenic Res. 6(2): 157-168; Rinehart et al. (1996) Plant Physiol. 112(3): 1331-1341; Van Camp et al. (1996) Plant Physiol. 112(2):525-535; Canevascini et al. (1996) Plant Physiol. 112(2):513-524; Yamamoto et al. (1994) Plant Cell Physiol. 35(5):773-778; Lam (1994) Results Probl. Cell Differ. 20: 181-196; Orozco et al. (1993) Plant Mol Biol. 23(6): 1129-1138; Matsuoka e/[alpha]/. (1993) Proc Natl. Acad. Sci. USA 90(20):9586-9590; and Guevara-Garcia et al. (1993) Plant J. 4(3):495-505. Such promoters can be modified, if necessary, for weak expression. In one embodiment, the nucleic acids of interest are targeted to the chloroplast for expression. In this manner, where the nucleic acid of interest is not directly inserted into the chloroplast, the expression cassette will additionally contain a chloroplast-targeting sequence comprising a nucleotide sequence that encodes a chloroplast transit peptide to direct the gene product of interest to the chloroplasts. Such transit peptides are known in the art. With respect to chloroplast-targeting sequences, “operably linked” means that the nucleic acid sequence encoding a transit peptide (i.e., the chloroplast-targeting sequence) is linked to the mutated PPO nucleic acid of the invention such that the two sequences are contiguous and in the same reading frame. See, for example, Von Heijne et al. (1991) Plant Mol. Biol. Rep. 9: 104-126; Clark et al. (1989) J. Biol. Chem. 264:17544-17550; Della-Cioppa et al. (1987) Plant Physiol. 84:965-968; Romer et al. (1993) Biochem. Biophys. Res. Commun. 196:1414-1421; and Shah et al. (1986) Science 233:478-481. While the mutated PPO proteins of the invention include a native chloroplast transit peptide, any chloroplast transit peptide known in the art can be fused to the amino acid sequence of a mature mutated PPO protein of the invention by operably linking a choloroplast-targeting sequence to the 5′-end of a nucleotide sequence encoding a mature mutated PPO protein of the invention. Chloroplast targeting sequences are known in the art and include the chloroplast small subunit of ribulose-1,5-bisphosphate carboxylase (Rubisco) (de Castro Silva Filho et al. (1996) Plant Mol. Biol. 30:769-780; Schnell et al. (1991) J. Biol. Chem. 266(5):3335-3342); 5-(enolpyruvyl)shikimate-3-phosphate synthase (EPSPS) (Archer et al. (1990) J. Bioenerg. Biomemb. 22(6):789-810); tryptophan synthase (Zhao et al. (1995) J. Biol. Chem. 270(11):6081-6087); plastocyanin (Lawrence et al. (1997) J. Biol. Chem. 272(33):20357-20363); chorismate synthase (Schmidt et al. (1993) J. Biol. Chem. 268(36):27447-27457); and the light harvesting chlorophyll a/b binding protein (LHBP) (Lamppa et al. (1988) J. Biol. Chem. 263: 14996-14999). See also Von Heijne et al. (1991) Plant Mol. Biol. Rep. 9: 104-126; Clark et al. (1989) J. Biol. Chem. 264:17544-17550; Della-Cioppa et al. (1987) Plant Physiol. 84:965-968; Romer et al. (1993) Biochem. Biophys. Res. Commun. 196: 1414-1421; and Shah et al. (1986) Science 233:478-481.

[1514] In a preferred embodiment, the transit peptide comprises the amino acid sequence of SEQ ID NO: 129, 130, 131, 132, 133, 134, 135, 136, 137, 138, 139, 140, 141, 142, 143, 144, 145, 146, 147, 148, 149, 150, 151, 152, 153, 154, 155, 156, 157, 158, 159, 160, 161, 162, 163, 164, 165, 166, 167, 168, 169, 170, 171, 172, 173, 174, 175, 176, 177, 178, 179, 180, 181, 182, 183, 184, 185, 186, 187, 188, 189, 190, 191, 192, 193, 194, 195, 196, 197, 198, 199, 200, 201, 202, 203, 204, 205, 206, 207, 208, 209, 210, 211, 212, 213, 214, 215, 216, 217, 218, 219, 220, 221, 222, 223, 224, 225, 226.

[1515] Preferred expression cassettes comprise a transit peptide from Amaranthus PPO-2 fused to PPO or PPO like polypeptides, such as chimeric expression cassettes having the SEQ ID NO: 240, 241, 242, 243, 244, 245, 246, 247, 248, 249, 250, 251, 252, 253, 254, 255, 256, 257, 258, 259, 260, 261, or 262 Methods for transformation of chloroplasts are known in the art. See, for example, Svab et al. (1990) Proc. Natl. Acad. ScL USA 87:8526-8530; Svab and Maliga (1993) Proc. Natl. Acad. Sci. USA 90:913-917; Svab and Maliga (1993) EMBO J. 12:601-606. The method relies on particle gun delivery of DNA containing a selectable marker and targeting of the DNA to the plastid genome through homologous recombination. Additionally, plastid transformation can be accomplished by transactivation of a silent plastid-borne transgene by tissue-preferred expression of a nuclear-encoded and plastid-directed RNA polymerase. Such a system has been reported in McBride et al. (1994) Proc. Natl. Acad. Sci. USA 91:7301-7305. The nucleic acids of interest to be targeted to the chloroplast may be optimized for expression in the chloroplast to account for differences in codon usage between the plant nucleus and this organelle. In this manner, the nucleic acids of interest may be synthesized using chloroplast-preferred codons. See, for example, U.S. Pat. No. 5,380,831, herein incorporated by reference.

[1516] In a preferred embodiment, the mutated PPO nucleic acid comprises a polynucleotide sequence selected from the group consisting of: a) a polynucleotide encoding a polypeptide as shown in SEQ ID NO: 1, 2, 3, 4, 5, 6, 7, 8, 9, 10, 11, 12, 13, 14, 15, 16, 17, 18, 19, 20, 21, 22, 23, 24, 25, 26, 27, 28, 29, 30, 31, 32, 33, 34, 35, 36, 37, 38, 39, 40, 41, 42, 43, 44, 45, 46, 47, 48, 49, 50, 51, 52, 53, 54, 55, 56, 57, 58, 59, 60, 61, 62, 63, 64, 65, 66, 67, 68, 69, 70, 71, 72, 73, 74, 75, 76, 77, 78, 79, 80, 81, 82, 83, 84, 85, 86, 87, 88, 89, 90, 91, 92, 93, 94, 95, 96, 97, 98, 99, 100, 101, 102, 103, 104, 105, 106, 107, 108, 109, 110, 111, 112, 113, 114, 115, 116, 117, 577, 579, 581, 583, 585, 587, 589, 591, 593, 595, 597, 599, 601, 603, 605, 607, 609, 611, 613, 615, 617, 619, 621, 623, 625, or 627, or a variant or derivative thereof; b) a polynucleotide comprising at least 60 consecutive nucleotides of any of a); and c) a polynucleotide complementary to the polynucleotide of any of a) through b) Preferably, the expression cassette of the present invention further comprises a transcription initiation regulatory region and a translation initiation regulatory region that are functional in the plant.

[1517] While the polynucleotides of the invention find use as selectable marker genes for plant transformation, the expression cassettes of the invention can include another selectable marker gene for the selection of transformed cells. Selectable marker genes, including those of the present invention, are utilized for the selection of transformed cells or tissues. Marker genes include, but are not limited to, genes encoding antibiotic resistance, such as those encoding neomycin phosphotransferase II (NEO) and hygromycin phosphotransferase (HPT), as well as genes conferring resistance to herbicidal compounds, such as glufosinate ammonium, bromoxynil, imidazolinones, and 2,4-dichlorophenoxyacetate (2,4-D). See generally, Yarranton (1992) Curr. Opin. Biotech. 3:506-511; Christophers on et al (1992) Proc. Natl. Acad. ScL USA 89:6314-6318; Yao et al. (1992) Cell 71:63-72; Reznikoff (1992) Mol Microbiol 6:2419-2422; Barkley et al (1980) in The Operon, pp. 177-220; Hu et al (1987) Cell 48:555-566; Brown et al (1987) Cell 49:603-612; Figge et al (1988) Cell 52:713-722; Deuschle et al (1989) Proc. Natl Acad. AcL USA 86:5400-5404; Fuerst et al (1989) Proc. Natl Acad. ScL USA 86:2549-2553; Deuschle et al (1990) Science 248:480-483; Gossen (1993) Ph.D. Thesis, University of Heidelberg; Reines et al (1993) Proc. Natl Acad. ScL USA 90: 1917-1921; Labow et al (1990) Mol Cell Biol 10:3343-3356; Zambretti et al (1992) Proc. Natl Acad. ScL USA 89:3952-3956; Bairn et al (1991) Proc. Natl Acad. ScL USA 88:5072-5076; Wyborski et al (1991) Nucleic Acids Res. 19:4647-4653; Hillenand-Wissman (1989) Topics Mol Struc. Biol 10: 143-162; Degenkolb et al (1991) Antimicrob. Agents Chemother. 35: 1591-1595; Kleinschnidt et al (1988) Biochemistry 27: 1094-1104; Bonin (1993) Ph.D. Thesis, University of Heidelberg; Gossen et al (1992) Proc. Natl Acad. ScL USA 89:5547-5551; Oliva et al (1992) Antimicrob. Agents Chemother. 36:913-919; Hlavka et al (1985) Handbook of Experimental Pharmacology, Vol. 78 (Springer-Verlag, Berlin); Gill et al (1988) Nature 334:721-724. Such disclosures are herein incorporated by reference. The above list of selectable marker genes is not meant to be limiting. Any selectable marker gene can be used in the present invention.

[1518] The invention further provides an isolated recombinant expression vector comprising the expression cassette containing a mutated PPO nucleic acid as described above, wherein expression of the vector in a host cell results in increased tolerance to a phenylpyridine herbicide as compared to a wild type variety of the host cell. As used herein, the term “vector” refers to a nucleic acid molecule capable of transporting another nucleic acid to which it has been linked. One type of vector is a “plasmid,” which refers to a circular double stranded DNA loop into which additional DNA segments can be ligated. Another type of vector is a viral vector, wherein additional DNA segments can be ligated into the viral genome. Certain vectors are capable of autonomous replication in a host cell into which they are introduced (e.g., bacterial vectors having a bacterial origin of replication and episomal mammalian vectors). Other vectors (e.g., non-episomal mammalian vectors) are integrated into the genome of a host cell upon introduction into the host cell, and thereby are replicated along with the host genome. Moreover, certain vectors are capable of directing the expression of genes to which they are operatively linked. Such vectors are referred to herein as “expression vectors.” In general, expression vectors of utility in recombinant DNA techniques are often in the form of plasmids. In the present specification, “plasmid” and “vector” can be used interchangeably as the plasmid is the most commonly used form of vector. However, the invention is intended to include such other forms of expression vectors, such as viral vectors (e.g., replication defective retroviruses, adenoviruses, and adeno-associated viruses), which serve equivalent functions.

[1519] The recombinant expression vectors of the invention comprise a nucleic acid of the invention in a form suitable for expression of the nucleic acid in a host cell, which means that the recombinant expression vectors include one or more regulatory sequences, selected on the basis of the host cells to be used for expression, which is operably linked to the nucleic acid sequence to be expressed. Regulatory sequences include those that direct constitutive expression of a nucleotide sequence in many types of host cells and those that direct expression of the nucleotide sequence only in certain host cells or under certain conditions. It will be appreciated by those skilled in the art that the design of the expression vector can depend on such factors as the choice of the host cell to be transformed, the level of expression of polypeptide desired, etc. The expression vectors of the invention can be introduced into host cells to thereby produce polypeptides or peptides, including fusion polypeptides or peptides, encoded by nucleic acids as described herein (e.g., mutated PPO polypeptides, fusion polypeptides, etc.).

[1520] In a preferred embodiment of the present invention, the mutated PPO polypeptides are expressed in plants and plants cells such as unicellular plant cells (such as algae) (See Falciatore et al., 1999, Marine Biotechnology 1(3):239-251 and references therein) and plant cells from higher plants (e.g., the spermatophytes, such as crop plants). A mutated PPO polynucleotide may be “introduced” into a plant cell by any means, including transfection, transformation or transduction, electroporation, particle bombardment, agroinfection, biolistics, and the like.

[1521] Suitable methods for transforming or transfecting host cells including plant cells can be found in Sambrook et al. (Molecular Cloning: A Laboratory Manual. 2nd, ed., Cold Spring Harbor Laboratory, Cold Spring Harbor Laboratory Press, Cold Spring Harbor, N.Y., 1989) and other laboratory manuals such as Methods in Molecular Biology, 1995, Vol. 44, Agrobacterium protocols, ed: Gartland and Davey, Humana Press, Totowa, N.J. As increased tolerance to phenylpyridine herbicides is a general trait wished to be inherited into a wide variety of plants like maize, wheat, rye, oat, triticale, rice, barley, soybean, peanut, cotton, rapeseed and canola, manihot, pepper, sunflower and tagetes, solanaceous plants like potato, tobacco, eggplant, and tomato, Vicia species, pea, alfalfa, bushy plants (coffee, cacao, tea), Salix species, trees (oil palm, coconut), perennial grasses, and forage crops, these crop plants are also preferred target plants for a genetic engineering as one further embodiment of the present invention. In a preferred embodiment, the plant is a crop plant. Forage crops include, but are not limited to, Wheatgrass, Canarygrass, Bromegrass, Wildrye Grass, Bluegrass, Orchardgrass, Alfalfa, Salfoin, Birdsfoot Trefoil, Alsike Clover, Red Clover, and Sweet Clover.

[1522] In one embodiment of the present invention, transfection of a mutated PPO polynucleotide into a plant is achieved by Agrobacterium mediated gene transfer. One transformation method known to those of skill in the art is the dipping of a flowering plant into an Agrobacteria solution, wherein the Agrobacteria contains the mutated PPO nucleic acid, followed by breeding of the transformed gametes. Agrobacterium mediated plant transformation can be performed using for example the GV3101(pMP90) (Koncz and Schell, 1986, Mol. Gen. Genet. 204:383-396) or LBA4404 (Clontech) Agrobacterium tumefaciens strain. Transformation can be performed by standard transformation and regeneration techniques (Deblaere et al., 1994, Nucl. Acids. Res. 13:4777-4788; Gelvin, Stanton B. and Schilperoort, Robert A, Plant Molecular Biology Manual, 2nd Ed.—Dordrecht: Kluwer Academic Publ., 1995.-in Sect., Ringbuc Zentrale Signatur: BT11-P ISBN 0-7923-2731-4; Glick, Bernard R. and Thompson, John E., Methods in Plant Molecular Biology and Biotechnology, Boca Raton: CRC Press, 1993 360 S., ISBN 0-8493-5164-2). For example, rapeseed can be transformed via cotyledon or hypocotyl transformation (Moloney et al., 1989, Plant Cell Report 8:238-242; De Block et al., 1989, Plant Physiol. 91:694-701). Use of antibiotics for Agrobacterium and plant selection depends on the binary vector and the 30 Agrobacterium strain used for transformation. Rapeseed selection is normally performed using kanamycin as selectable plant marker. Agrobacterium mediated gene transfer to flax can be performed using, for example, a technique described by Mlynarova et al., 1994, Plant Cell Report 13:282-285. Additionally, transformation of soybean can be performed using for example a technique described in European Patent No. 0424 047, U.S. Pat. No. 5,322,783, European Patent No. 0397 687, U.S. Pat. No. 5,376,543, or 5,169,770. Transformation of maize can be achieved by particle bombardment, polyethylene glycol mediated DNA uptake, or via the silicon carbide fiber technique. (See, for example, Freeling and Walbot “The maize handbook” Springer Verlag: New York (1993) ISBN 3-540-97826-7). A specific example of maize transformation is found in U.S. Pat. No. 5,990,387, and a specific example of wheat transformation can be found in PCT Application No. WO 93/07256.

[1523] According to the present invention, the introduced mutated PPO polynucleotide may be maintained in the plant cell stably if it is incorporated into a non-chromosomal autonomous replicon or integrated into the plant chromosomes. Alternatively, the introduced mutated PPO polynucleotide may be present on an extra-chromosomal non-replicating vector and be transiently expressed or transiently active. In one embodiment, a homologous recombinant microorganism can be created wherein the mutated PPO polynucleotide is integrated into a chromosome, a vector is prepared which contains at least a portion of an PPO gene into which a deletion, addition, or substitution has been introduced to thereby alter, e.g., functionally disrupt, the endogenous PPO gene and to create a mutated PPO gene. To create a point mutation via homologous recombination, DNA-RNA hybrids can be used in a technique known as chimeraplasty (Cole-Strauss et al., 1999, Nucleic Acids Research 27(5):1323-1330 and Kmiec, 1999, Gene therapy American Scientist 87(3):240-247). Other homologous recombination procedures in Triticum species are also well known in the art and are contemplated for use herein.

[1524] In the homologous recombination vector, the mutated PPO gene can be flanked at its 5′ and 3′ ends by an additional nucleic acid molecule of the PPO gene to allow for homologous recombination to occur between the exogenous mutated PPO gene carried by the vector and an endogenous PPO gene, in a microorganism or plant. The additional flanking PPO nucleic acid molecule is of sufficient length for successful homologous recombination with the endogenous gene. Typically, several hundreds of base pairs up to kilobases of flanking DNA (both at the 5′ and 3′ ends) are included in the vector (see e.g., Thomas, K. R., and Capecchi, M. R., 1987, Cell 51:503 for a description of homologous recombination vectors or Strepp et al., 1998, PNAS, 95(8):4368-4373 for cDNA based recombination in Physcomitrella patens). However, since the mutated PPO gene normally differs from the PPO gene at very few amino acids, a flanking sequence is not always necessary. The homologous recombination vector is introduced into a microorganism or plant cell (e.g., via polyethylene glycol mediated DNA), and cells in which the introduced mutated PPO gene has homologously recombined with the endogenous PPO gene are selected using art-known techniques.

[1525] In another embodiment, recombinant microorganisms can be produced that contain selected systems that allow for regulated expression of the introduced gene. For example, inclusion of a mutated PPO gene on a vector placing it under control of the lac operon permits expression of the mutated PPO gene only in the presence of IPTG. Such regulatory systems are well known in the art.

[1526] Another aspect of the invention pertains to host cells into which a recombinant expression vector of the invention has been introduced. The terms “host cell” and “recombinant host cell” are used interchangeably herein. It is understood that such terms refer not only to the particular subject cell but they also apply to the progeny or potential progeny of such a cell. Because certain modifications may occur in succeeding generations due to either mutation or environmental influences, such progeny may not, in fact, be identical to the parent cell, but are still included within the scope of the term as used herein. A host cell can be any prokaryotic or eukaryotic cell. For example, a mutated PPO polynucleotide can be expressed in bacterial cells such as C. glutamicum, insect cells, fungal cells, or mammalian cells (such as Chinese hamster ovary cells (CHO) or COS cells), algae, ciliates, plant cells, fungi or other microorganisms like C. glutamicum. Other suitable host cells are known to those skilled in the art.

[1527] A host cell of the invention, such as a prokaryotic or eukaryotic host cell in culture, can be used to produce (i.e., express) a mutated PPO polynucleotide. Accordingly, the invention further provides methods for producing mutated PPO polypeptides using the host cells of the invention. In one embodiment, the method comprises culturing the host cell of invention (into which a recombinant expression vector encoding a mutated PPO polypeptide has been introduced, or into which genome has been introduced a gene encoding a wild-type or mutated PPO polypeptide) in a suitable medium until mutated PPO polypeptide is produced. In another embodiment, the method further comprises isolating mutated PPO polypeptides from the medium or the host cell. Another aspect of the invention pertains to isolated mutated PPO polypeptides, and biologically active portions thereof. An “isolated” or “purified” polypeptide or biologically active portion thereof is free of some of the cellular material when produced by recombinant DNA techniques, or chemical precursors or other chemicals when chemically synthesized. The language “substantially free of cellular material” includes preparations of mutated PPO polypeptide in which the polypeptide is separated from some of the cellular components of the cells in which it is naturally or recombinantly produced. In one embodiment, the language “substantially free of cellular material” includes preparations of a mutated PPO polypeptide having less than about 30% (by dry weight) of non-mutated PPO material (also referred to herein as a “contaminating polypeptide”), more preferably less than about 20% of non-mutated PPO material, still more preferably less than about 10% of non-mutated PPO material, and most preferably less than about 5% non-mutated PPO material.

[1528] When the mutated PPO polypeptide, or biologically active portion thereof, is recombinantly produced, it is also preferably substantially free of culture medium, i.e., culture medium represents less than about 20%, more preferably less than about 10%, and most preferably less than about 5% of the volume of the polypeptide preparation. The language “substantially free of chemical precursors or other chemicals” includes preparations of mutated PPO polypeptide in which the polypeptide is separated from chemical precursors or other chemicals that are involved in the synthesis of the polypeptide. In one embodiment, the language “substantially free of chemical precursors or other chemicals” includes preparations of a mutated PPO polypeptide having less than about 30% (by dry weight) of chemical precursors or non-mutated PPO chemicals, more preferably less than about 20% chemical precursors or non-mutated PPO chemicals, still more preferably less than about 10% chemical precursors or non-mutated PPO chemicals, and most preferably less than about 5% chemical precursors or non-mutated PPO chemicals. In preferred embodiments, isolated polypeptides, or biologically active portions thereof, lack contaminating polypeptides from the same organism from which the mutated PPO polypeptide is derived.

[1529] Typically, such polypeptides are produced by recombinant expression of, for example, a mutated PPO polypeptide in plants other than, or in microorganisms such as C. glutamicum, ciliates, algae, or fungi.

[1530] In other aspects, a method for treating a plant of the present invention is provided.

[1531] In some embodiments, the method comprises contacting the plant with an agronomically acceptable composition.

[1532] In another aspect, the present invention provides a method for preparing a descendent seed. The method comprises planting a seed of or capable of producing a plant of the present invention. In one embodiment, the method further comprises growing a descendent plant from the seed; and harvesting a descendant seed from the descendent plant. In other embodiments, the method further comprises applying a phenylpyridine herbicides herbicidal composition to the descendent plant.

[1533] In another embodiment, the invention refers to harvestable parts of the transgenic plant according to the present invention. Preferably, the harvestable parts comprise the PPO nucleic acid or PPO protein of the present invention. The harvestable parts may be seeds, roots, leaves and/or flowers comprising the PPO nucleic acid or PPO protein or parts thereof. Preferred parts of soy plants are soy beans comprising the PPO nucleic acid or PPO protein.

[1534] In another embodiment, the invention refers to products derived from a plant according to the present invention, parts thereof or harvestable parts thereof. A preferred plant product is fodder, seed meal, oil, or seed-treatment-coated seeds. Preferably, the meal and/or oil comprises the mutated PPO nucleic acids or PPO proteins of the present invention.

[1535] In another embodiment, the invention refers to a method for the production of a product, which method comprises
[1536] a) growing the plants of the invention or obtainable by the methods of invention and
[1537] b) producing said product from or by the plants of the invention and/or parts, e.g. seeds, of these plants.

[1538] In a further embodiment the method comprises the steps
[1539] a) growing the plants of the invention,
[1540] b) removing the harvestable parts as defined above from the plants and
[1541] c) producing said product from or by the harvestable parts of the invention.

[1542] The product may be produced at the site where the plant has been grown, the plants and/or parts thereof may be removed from the site where the plants have been grown to produce the product. Typically, the plant is grown, the desired harvestable parts are removed from the plant, if feasible in repeated cycles, and the product made from the harvestable parts of the plant. The step of growing the plant may be performed only once each time the methods of the invention is performed, while allowing repeated times the steps of product production e.g. by repeated removal of harvestable parts of the plants of the invention and if necessary further processing of these parts to arrive at the product. It is also possible that the step of growing the plants of the invention is repeated and plants or harvestable parts are stored until the production of the product is then performed once for the accumulated plants or plant parts. Also, the steps of growing the plants and producing the product may be performed with an overlap in time, even simultaneously to a large extend or sequentially. Generally the plants are grown for some time before the product is produced.

[1543] In one embodiment the products produced by said methods of the invention are plant products such as, but not limited to, a foodstuff, feedstuff, a food supplement, feed supplement, fiber, cosmetic and/or pharmaceutical. Foodstuffs are regarded as compositions used for nutrition and/or for supplementing nutrition. Animal feedstuffs and animal feed supplements, in particular, are regarded as foodstuffs.

[1544] In another embodiment the inventive methods for the production are used to make agricultural products such as, but not limited to, plant extracts, proteins, amino acids, carbohydrates, fats, oils, polymers, vitamins, and the like.

[1545] It is possible that a plant product consists of one or more agricultural products to a large extent.

[1546] As described above, the present invention teaches compositions and methods for increasing the PPO-inhibiting tolerance of a crop plant or seed as compared to a wild-type variety of the plant or seed. In a preferred embodiment, the PPO-inhibiting tolerance of a crop plant or seed is increased such that the plant or seed can withstand a phenylpyridine herbicide application of preferably approximately 1-1000 g ai ha⁻¹, more preferably 1-200 g ai ha⁻¹, even more preferably 5-150 g ai ha⁻¹, and most preferably 10-100 g ai ha-1. As used herein, to “withstand” a phenylpyridine herbicide application means that the plant is either not killed or only moderately injured by such application. It will be understood by the person skilled in the art that the application rates may vary, depending on the environmental conditions such as temperature or humidity, and depending on the chosen kind of herbicide (active ingredient ai).

[1547] Furthermore, the present invention provides methods that involve the use of at least one phenylpyridine herbicide, optionally in combination with one or more herbicidal compounds B, and, optionally, a safener C, as described in detail supra.

[1548] In these methods, the phenylpyridine herbicide can be applied by any method known in the art including, but not limited to, seed treatment, soil treatment, and foliar treatment. Prior to application, the phenylpyridine herbicide can be converted into the customary formulations, for example solutions, emulsions, suspensions, dusts, powders, pastes and granules. The use form depends on the particular intended purpose; in each case, it should ensure a fine and even distribution of the compound according to the invention.

[1549] By providing plants having increased tolerance to phenylpyridine herbicide, a wide variety of formulations can be employed for protecting plants from weeds, so as to enhance plant growth and reduce competition for nutrients. A phenylpyridine herbicide can be used by itself for pre-emergence, post-emergence, pre-planting, and at-planting control of weeds in areas surrounding the crop plants described herein, or a phenylpyridine herbicide formulation can be used that contains other additives. The phenylpyridine herbicide can also be used as a seed treatment. Additives found in a phenylpyridine herbicide formulation include other herbicides, detergents, adjuvants, spreading agents, sticking agents, stabilizing agents, or the like. The phenylpyridine herbicide formulation can be a wet or dry preparation and can include, but is not limited to, flowable powders, emulsifiable concentrates, and liquid concentrates. The phenylpyridine herbicide and herbicide formulations can be applied in accordance with conventional methods, for example, by spraying, irrigation, dusting, or the like.

[1550] Suitable formulations are described in detail in PCT/EP2009/063387 and PCT/EP2009/063386, which are incorporated herein by reference.

[1551] It should also be understood that the foregoing relates to preferred embodiments of the present invention and that numerous changes may be made therein without departing from the scope of the invention. The invention is further illustrated by the following examples, which are not to be construed in any way as imposing limitations upon the scope thereof. On the contrary, it is to be clearly understood that resort may be had to various other embodiments, modifications, and equivalents thereof, which, after reading the description herein, may suggest themselves to those skilled in the art without departing from the spirit of the present invention and/or the scope of the appended claims.

### EXAMPLES

### Example 1: Site-Directed Mutagenesis PPO

[1552] All nucleic acid coding sequence and all single and double mutants encoding a herbicide tolerant PPO polypeptides are synthesized and cloned by Geneart (Geneart AG, Regensburg, Germany). Rational design mutants are synthesized by Geneart. Random PPO gene libraries are synthesized by Geneart. Plasmids are isolated from E. coli TOP10 by performing a plasmid minpreparation and confirmed by DNA sequencing.

### Example 2: Expression and Purification of Recombinant Wildtype and Mutant PPO

[1553] (Taken from: Franck E. Dayan, Pankaj R. Daga, Stephen O. Duke, Ryan M. Lee, Patrick J. Tranel, Robert J. Doerksen. Biochemical and structural consequences of a glycine deletion in the α-8 helix of protoporphyrinogen oxidase. Biochimica et Biophysica Acta 1804 (2010), 1548-56) Clones in pRSET vector are transformed into BL21(DE3)-pLysS strain of E. coli. Cells are grown in 250 mL of LB with 100 μgmL-1 of carbenicillin, shaking overnight at 37° C. Cultures are diluted in 1 L of LB with antibiotic and grown at 37° C. shaking for 2 h, induced with 1 mM IPTG and grown at 25° C. shaking for 5 more hours. The cells are harvested by centrifugation at 1600×g, washed with 0.09% NaCl, and stored at −80° C. Cells are lysed using a French press at 140 MPa in 50 mM sodium phosphate pH 7.5, 1 M NaCl, 5 mM imidazole, 5% glycerol, and 1 μg mL-1 leupeptin. Following lysis, 0.5 U of benzonase (Novagen, EMD Chemicals, Inc., Gibbstown, N.J.) and PMSF (final concentration of 1 mM) are added. Cell debris is removed by centrifugation at 3000×g. His-tagged PPO proteins are purified on a nickel activated Hitrap Chelating HP column (GE Healthcare Bio-Sciences Corp., Piscataway, N.J.) equilibrated with 20 mM sodium phosphate pH 8.0, 50 mM NaCl, 5 mM imidazole, 5 mM MgCl2, 0.1 mM EDTA, and 17% glycerol. PPO is eluted with 250 mM imidazole. The active protein is desalted on a PD-10 column (GE Healthcare Bio-Sciences Corp., Piscataway, N.J.) equilibrated with a 20 mM sodium phosphate buffer, pH 7.5, 5 mM MgCl2, 1 mM EDTA and 17% glycerol. Each litre of culture provided approximately 10 mg of pure PPO, which is stored at −20° C. until being used in assays.

### Example 3: PPO Enzyme Assay (Non-Recombinant)

[1554] PPO protein (EC 1.3.3.4) is extracted from coleoptiles or shoots (150 g fresh weight) of dark-grown corn, black nightshade, morning glory, and velvetleaf seedlings as described previously (Grossmann et al. 2010). Before harvesting, the seedlings are allowed to green for 2 hours in the light in order to achieve the highest specific enzyme activities in the thylakoid fractions at low chlorophyll concentrations. At high chlorophyll concentrations significant quenching of fluorescence occurs, which limits the amount of green thylakoids that can be used in the test. Plant materials are homogenized in the cold with a Braun blender using a fresh-weight-to-volume ratio of 1:4. Homogenization buffer consisted of tris(hydroxymethyl)aminomethane (Tris)-HCl (50 mM; pH 7.3), sucrose (0.5 M), magnesium chloride (1 mM), ethylenediaminetetraacetic acid (EDTA) (1 mM) and bovine serum albumin (2 g L⁻¹). After filtration through four layers of Miracloth, crude plastid preparations are obtained after centrifugation at 10 000×g for 5 min and resuspension in homogenization buffer before centrifugation at 150×g for 2 min to remove crude cell debris. The supernatant is centrifuged at 4000×g for 15 min and the pellet fraction is resuspended in 1 ml of a buffer containing Tris-HCl (50 mM; pH 7.3), EDTA (2 mM), leupeptin (2 μM), pepstatin (2 μM) and glycerol (200 ml L⁻¹) and stored at −80° C. until use. Protein is determined in the enzyme extract with bovine serum albumin as a standard. PPO activity is assayed fluorometrically by monitoring the rate of Proto formation from chemically reduced protoporphyrinogen IX under initial velocity conditions. The assay mixture consisted of Tris-HCl (100 mM; pH 7.3), EDTA (1 mM), dithiothreitol (5 mM), Tween 80 (0.085%), protoporphyrinogen IX (2 μM), and 40 μg extracted protein in a total volume of 200 μl. The reaction is initiated by addition of substrate protoporphyrinogen IX at 22° C. saflufenacil, 1,5-dimethyl-6-thioxo-3-(2,2,7-trifluoro-3-oxo-4-(prop-2-ynyl)-3,4-dihydro-2H-benzo[b][1,4]oxazin-6-yl)-1,3,5-triazinane-2,4-dione (CAS 1258836-72-4), flumioxazin, butafenacil, acifluorfen, lactofen, bifenox, sulfentrazone, and photosynthesis inhibitor diuron as negative control are prepared in dimethyl sulfoxide (DMSO) solution (0.1 mM concentration of DMSO in the assay) and added to the assay mixture in concentrations of 0.005 pM to 5 μM before incubation. Fluorescence is monitored directly from the assay mixture using a POLARstar Optima/Galaxy (BMG) with excitation at 405 nm and emission monitored at 630 nm. Non-enzymatic activity in the presence of heat-inactivated extract is negligible. Inhibition of enzyme activity induced by the herbicide is expressed as percentage inhibition relative to untreated controls. Molar concentrations of compound required for 50% enzyme inhibition (IC₅₀ values) are calculated by fitting the values to the dose-response equation using non-linear regression analysis.

### Example 4: PPO Enzyme Assay (Recombinant)

[1555] Proto is purchased from Sigma-Aldrich (Milwaukee, Wis.). Protogen is prepared according to Jacobs and Jacobs (N. J. Jacobs, J. M. Jacobs, Assay for enzymatic protoporphyrinogen oxidation, a late step in heme synthesis, Enzyme 28 (1982) 206-219). Assays are conducted in 100 mM sodium phosphate pH 7.4 with 0.1 mM EDTA, 0.1% Tween 20, 5 μM FAD, and 500 mM imidazole. Dose-response curves with the PPO inhibitors saflufenacil, 1,5-dimethyl-6-thioxo-3-(2,2,7-trifluoro-3-oxo-4-(prop-2-ynyl)-3,4-dihydro-2H-benzo[b][1,4]oxazin-6-yl)-1,3,5-triazinane-2,4-dione (CAS 1258836-72-4), flumioxazin, butafenacil, acifluorfen, lactofen, bifenox, sulfentrazone, and photosynthesis inhibitor diuron as negative control, and MC-15608 are obtained in the presence of 150 μM Protogen. The excitation and emission bandwidths are set at 1.5 and 30 nm, respectively. All assays are made in duplicates or triplicates and measured using a POLARstar Optima/Galaxy (BMG) with excitation at 405 nm and emission monitored at 630 nm. Molar concentrations of compound required for 50% enzyme inhibition (IC₅₀ values) are calculated by fitting the values to the dose-response equation using non-linear regression analysis. The results are shown in Table x.

### Example 5: Engineering PPO-Derivative Herbicide Tolerant Plants Having Wildtype or Mutated PPO Sequences

[1556] PPO-derivative herbicide tolerant soybean (Glyceine max), plants are produced by a method as described by Olhoft et al. (US patent 2009/0049567). For transformation of soybean or Arabidopsis thaliana, Wildtype or Mutated PPO sequences encoding herbicide tolerant PPO polypeptides are cloned with standard cloning techniques as described in Sambrook et al. (Molecular cloning (2001) Cold Spring Harbor Laboratory Press) in a binary vector containing resistance marker gene cassette (AHAS) and mutated PPO sequence (marked as GOI) in between ubiquitin promoter (PcUbi) and nopaline synthase terminator (NOS) sequence. For corn transformation, Wildtype or Mutated PPO sequences are cloned with standard cloning techniques as described in Sambrook et al. (Molecular cloning (2001) Cold Spring Harbor Laboratory Press) in a binary vector containing resistance marker gene cassette (AHAS) and mutated PPO sequence (marked as GOI) in between corn ubiquitin promoter (ZmUbi) and nopaline synthase terminator (NOS) sequence. Binary plasmids are introduced to Agrobacterium tumefaciens for plant transformation. Plasmid constructs are introduced into soybean's axillary meristem cells at the primary node of seedling explants via Agrobacterium-mediated transformation. After inoculation and co-cultivation with Agrobacteria, the explants are transferred to shoot introduction media without selection for one week. The explants are subsequently transferred to a shoot induction medium with 1-3 μM imazapyr (Arsenal) for 3 weeks to select for transformed cells. Explants with healthy callus/shoot pads at the primary node are then transferred to shoot elongation medium containing 1-3 μM imazapyr until a shoot elongated or the explant died. Transgenic plantlets are rooted, subjected to TaqMan analysis for the presence of the transgene, transferred to soil and grown to maturity in greenhouse. Plant transformation vector constructs containing mutated PPO sequences are introduced into maize immature embryos via Agrobacterium-mediated transformation according to the procedure outlined in Peng et al. (WO2006/136596).

[1557] Transformed cells are selected in selection media supplemented with 0.5-1.5 μM imazethapyr for 3-4 weeks. Transgenic plantlets are regenerated on plant regeneration media and rooted afterwards. Transgenic plantlets are subjected to TaqMan analysis for the presence of the transgene before being transplanted to potting mixture and grown to maturity in greenhouse. Arabidopsis thaliana are transformed with wildtype or mutated PPO sequences by floral dip method as described by McElver and Singh (WO 2008/124495). Transgenic Arabidopsis plants are subjected to TaqMan analysis for analysis of the number of integration loci. Transformation of Oryza sativa (rice) are done by protoplast transformation as described by Peng et al. (U.S. Pat. No. 6,653,529) T0 or T1 transgenic plants of soybean, corn, and rice containing mutated PPO sequences are tested for improved tolerance to PPO-derived herbicides in greenhouse studies and mini-plot studies with the following PPO-inhibiting herbicides: saflufenacil, 1,5-dimethyl-6-thioxo-3-(2,2,7-trifluoro-3-oxo-4-(prop-2-ynyl)-3,4-dihydro-2 H-benzo[b][1,4]oxazin-6-yl)-1,3,5-triazinane-2,4-dione (CAS 1258836-72-4), flumioxazin, butafenacil, acifluorfen, lactofen, bifenox, sulfentrazone, methyl 2-[2-chloro-5-[3-chloro-5-(trifluoromethyl)-2-pyridyl]-4-fluoro-phenoxy]-2-methoxy-acetate, ethyl 2-[2-chloro-5-[3-chloro-5-(trifluoromethyl)-2-pyridyl]-4-fluoro-phenoxy]-2-methoxy-acetate, prop-2-ynyl 2-[2-chloro-5-[3-chloro-5-(trifluoromethyl)-2-pyridyl]-4-fluoro-phenoxy]-2-methoxy-acetate and photosynthesis inhibitor diuron as negative control.

### Example 6: Tissue Culture Conditions

[1558] An in vitro tissue culture mutagenesis assay has been developed to isolate and characterize plant tissue (e.g., maize, rice tissue) that is tolerant to protoporphyrinogen oxidase inhibiting herbicides, e.g. methyl 2-[2-chloro-5-[3-chloro-5-(trifluoromethyl)-2-pyridyl]-4-fluoro-phenoxy]-2-methoxy-acetate, ethyl 2-[2-chloro-5-[3-chloro-5-(trifluoromethyl)-2-pyridyl]-4-fluoro-phenoxy]-2-methoxy-acetate, prop-2-ynyl 2-[2-chloro-5-[3-chloro-5-(trifluoromethyl)-2-pyridyl]-4-fluoro-phenoxy]-2-methoxy-acetate, or (saflufenacil, 1,5-dimethyl-6-thioxo-3-(2,2,7-trifluoro-3-oxo-4-(prop-2-ynyl)-3,4-dihydro-2H-benzo[b][1,4]oxazin-6-yl)-1,3,5-triazinane-2,4-dione (CAS 1258836-72-4), flumioxazin, butafenacil, acifluorfen, lactofen, bifenox, sulfentrazone, and photosynthesis inhibitor diuron as negative control). The assay utilizes the somaclonal variation that is found in in vitro tissue culture. Spontaneous mutations derived from somaclonal variation can be enhanced by chemical mutagenesis and subsequent selection in a stepwise manner, on increasing concentrations of herbicide.

[1559] The present invention provides tissue culture conditions for encouraging growth of friable, embryogenic maize or rice callus that is regenerable. Calli are initiated from 4 different maize or rice cultivars encompassing Zea mays and Japonica (Taipei 309, Nipponbare, Koshihikari) and Indica (Indica 1) varieties, respectively. Seeds are surface sterilized in 70% ethanol for approximately 1 min followed by 20% commercial Clorox bleach for 20 minutes. Seeds are rinsed with sterile water and plated on callus induction media. Various callus induction media are tested. The ingredient lists for the media tested are presented in Table y.

TABLE y

| Ingredient | Supplier | R001M | | R025M | | R026M | | R327M | | R008M | | MS711R | |
|---|---|---|---|---|---|---|---|---|---|---|---|---|---|
| B5 Vitamins | Sigma | | | | | | | | | 1.0 | X | | |
| MS salts | Sigma | | | | | 1.0 | X | 1.0 | X | 1.0 | X | 1.0 | X |
| MS Vitamins | Sigma | | | | | 1.0 | X | 1.0 | X | | | | |
| N6 salts | Phytotech | 4.0 | g/L | 4.0 | g/L | | | | | | | | |
| N6 vitamins | Phytotech | 1.0 | X | 1.0 | X | | | | | | | | |
| L-Proline | Sigma | 2.9 | g/L | 0.5 | g/L | | | | | | | 1.2 | g/L |
| Casamino Acids | BD | 0.3 | g/L | 0.3 | g/L | 2 | g/L | | | | | | |
| Casein | Sigma | | | | | | | | | | | | |
| Hydrolysate | | | | | | | | | | | | 1.0 | g/L |
| L-Asp | Phytotech | | | | | | | | | | | | |
| Monohydrate | | | | | | | | | | | | 150 | mg/L |
| Nicotinic Acid | Sigma | | | | | | | | | | | 0.5 | mg/L |
| Pyridoxine HCl | Sigma | | | | | | | | | | | 0.5 | mg/L |
| Thiamine HCl | Sigma | | | | | | | | | | | 1.0 | mg/L |
| Myo-inositol | Sigma | | | | | | | | | | | 100 | mg/L |
| MES | Sigma | 500 | mg/L | 500 | mg/L | 500 | mg/L | 500 | mg/L | 500 | mg/L | 500 | mg/L |
| Maltose | VWR | 30 | g/L | 30 | g/L | 30 | g/L | 30 | g/L | | | | |
| Sorbitol | Duchefa | | | | | 30 | g/L | | | | | | |
| Sucrose | VWR | | | | | | | | | 10 | g/L | 30 | g/L |
| NAA | Duchefa | | | | | | | | | 50 | μg/L | | |
| 2,4-D | Sigma | 2.0 | mg/L | | | | | | | | | 1.0 | mg/L |
| MgCl₂•6H₂O | VWR | | | | | | | | | 750 | mg/L | | |
| | | pH | | | | | | | | | | | |
| | | 5.8 | | 5.8 | | 5.8 | | 5.8 | | 5.8 | | 5.7 | |
| Gelrite | Duchefa | 4.0 | g/L | | | | | | | 2.5 | g/L | | |
| Agarose Type1 | Sigma | | | 7.0 | g/L | 10 | g/L | 10 | g/L | | | | |
| | | Autoclave | | | | | | | | | | | |
| | | 15 min | | 15 min | | 15 min | | 15 min | | 15 min | | 20 min | |
| Kinetin | Sigma | | | 2.0 | mg/L | 2.0 | mg/L | | | | | | |
| NAA | Duchefa | | | 1.0 | mg/L | 1.0 | mg/L | | | | | | |
| ABA | Sigma | | | 5.0 | mg/L | | | | | | | | |
| Cefotaxime | Duchefa | | | 0.1 | g/L | 0.1 | g/L | 0.1 | g/L | | | | |
| Vancomycin | Duchefa | | | 0.1 | g/L | 0.1 | g/L | 0.1 | g/L | | | | |
| G418 Disulfate | Sigma | | | 20 | mg/L | 20 | mg/L | 20 | mg/L | | | | |

R001M callus induction media is selected after testing numerous variations. Cultures are kept in the dark at 30° C. Embryogenic callus is subcultured to fresh media after 10-14 days.

### Example 7: Selection of Herbicide-Tolerant Calli

[1560] Once tissue culture conditions are determined, further establishment of selection conditions are established through the analysis of tissue survival in kill curves with saflufenacil, 1,5-dimethyl-6-thioxo-3-(2,2,7-trifluoro-3-oxo-4-(prop-2-ynyl)-3,4-dihydro-2 H-benzo[b][1,4]oxazin-6-yl)-1,3,5-triazinane-2,4-dione (CAS 1258836-72-4), flumioxazin, butafenacil, acifluorfen, lactofen, bifenox, sulfentrazone, and photosynthesis inhibitor diuron as negative control. Careful consideration of accumulation of the herbicide in the tissue, as well as its persistence and stability in the cells and the culture media is performed. Through these experiments, a sub-lethal dose has been established for the initial selection of mutated material. After the establishment of the starting dose of methyl 2-[2-chloro-5-[3-chloro-5-(trifluoromethyl)-2-pyridyl]-4-fluoro-phenoxy]-2-methoxy-acetate, ethyl 2-[2-chloro-5-[3-chloro-5-(trifluoromethyl)-2-pyridyl]-4-fluoro-phenoxy]-2-methoxy-acetate, prop-2-ynyl 2-[2-chloro-5-[3-chloro-5-(trifluoromethyl)-2-pyridyl]-4-fluoro-phenoxy]-2-methoxy-acetate, saflufenacil, 1,5-dimethyl-6-thioxo-3-(2,2,7-trifluoro-3-oxo-4-(prop-2-ynyl)-3,4-dihydro-2H-benzo[b][1,4]oxazin-6-yl)-1,3,5-triazinane-2,4-dione (CAS 1258836-72-4), flumioxazin, butafenacil, acifluorfen, lactofen, bifenox, sulfentrazone, and photosynthesis inhibitor diuron as negative control in selection media, the tissues are selected in a step-wise fashion by increasing the concentration of the PPO inhibitor with each transfer until cells are recovered that grew vigorously in the presence of toxic doses. The resulting calli are further subcultured every 3-4 weeks to R001M with selective agent. Over 26,000 calli are subjected to selection for 4-5 subcultures until the selective pressure is above toxic levels as determined by kill curves and observations of continued culture. Alternatively, liquid cultures initiated from calli in MS711R with slow shaking and weekly subcultures. Once liquid cultures are established, selection agent is added directly to the flask at each subculture. Following 2-4 rounds of liquid selection, cultures are transferred to filters on solid R001M media for further growth.

### Example 8: Regeneration of Plants

[1561] Tolerant tissue is regenerated and characterized molecularly for PPO gene sequence mutations and/or biochemically for altered PPO activity in the presence of the selective agent. In addition, genes involved directly and/or indirectly in tetrapyrrole biosynthesis and/or metabolism pathways are also sequenced to characterize mutations. Finally, enzymes that change the fate (e.g. metabolism, translocation, transportation) are also sequence to characterized mutations. Following herbicide selection, calli are regenerated using a media regime of R025M for 10-14 days, R026M for ca. 2 weeks, R327M until well formed shoots are developed, and R008S until shoots are well rooted for transfer to the greenhouse. Regeneration is carried out in the light.

[1562] No selection agent is included during regeneration. Once strong roots are established, MO regenerants are transplant to the greenhouse in square or round pots. Transplants are maintained under a clear plastic cup until they are adapted to greenhouse conditions. The greenhouse is set to a day/night cycle of 27° C./21° C. (80° F./70° F.) with 600 W high pressure sodium lights supplementing light to maintain a 14 hour day length. Plants are watered according to need, depending in the weather and fertilized daily.

### Example 9: Sequence Analysis

[1563] Leaf tissue is collected from clonal plants separated for transplanting and analyzed as individuals. Genomic DNA is extracted using a Wizard® 96 Magnetic DNA Plant System kit (Promega, U.S. Pat. Nos. 6,027,945 & 6,368,800) as directed by the manufacturer. Isolated DNA is PCR amplified using the appropriate forward and reverse primer.

[1564] PCR amplification is performed using Hotstar Taq DNA Polymerase (Qiagen) using touchdown thermocycling program as follows: 96° C. for 15 min, followed by 35 cycles (96° C., 30 sec; 58° C.-0.2° C. per cycle, 30 sec; 72° C., 3 min and 30 sec), 10 min at 72° C. PCR products are verified for concentration and fragment size via agarose gel electrophoresis. Dephosphorylated PCR products are analyzed by direct sequence using the PCR primers (DNA Landmarks, or Entelechon). Chromatogram trace files (.scf) are analyzed for mutation relative to the wild-type gene using Vector NTI Advance 10™ (Invitrogen). Based on sequence information, mutations are identified in several individuals. Sequence analysis is performed on the representative chromatograms and corresponding AlignX alignment with default settings and edited to call secondary peaks.

### Example 10: Demonstration of Herbicide-Tolerance

[1565] T0 or T1 transgenic plant of soybean, corn, Canola varieties and rice containing PPO1 and or PPO2 sequences are tested for improved tolerance to herbicides in greenhouse studies and mini-plot studies with the following herbicides: methyl 2-[2-chloro-5-[3-chloro-5-(trifluoromethyl)-2-pyridyl]-4-fluoro-phenoxy]-2-methoxy-acetate, ethyl 2-[2-chloro-5-[3-chloro-5-(trifluoromethyl)-2-pyridyl]-4-fluoro-phenoxy]-2-methoxy-acetate, prop-2-ynyl 2-[2-chloro-5-[3-chloro-5-(trifluoromethyl)-2-pyridyl]-4-fluoro-phenoxy]-2-methoxy-acetate, saflufenacil, 1,5-dimethyl-6-thioxo-3-(2,2,7-trifluoro-3-oxo-4-(prop-2-ynyl)-3,4-dihydro-2 H-benzo[b][1,4]oxazin-6-yl)-1,3,5-triazinane-2,4-dione (CAS 1258836-72-4), flumioxazin, butafenacil, acifluorfen, lactofen, bifenox, sulfentrazone, and photosynthesis inhibitor diuron as negative control. For the pre-emergence treatment, the herbicides are applied directly after sowing by means of finely distributing nozzles. The containers are irrigated gently to promote germination and growth and subsequently covered with transparent plastic hoods until the plants have rooted. This cover causes uniform germination of the test plants, unless this has been impaired by the herbicides. For post emergence treatment, the test plants are first grown to a height of 3 to 15 cm, depending on the plant habit, and only then treated with the herbicides. For this purpose, the test plants are either sown directly, and grown in the same containers or they are first grown separately and transplanted into the test containers a few days prior to treatment.

[1566] For testing of T0 plants, cuttings can be used. In the case of soybean plants, an optimal shoot for cutting is about 7.5 to 10 cm tall, with at least two nodes present. Each cutting is taken from the original transformant (mother plant) and dipped into rooting hormone powder (indole-3-butyric acid, IBA). The cutting is then placed in oasis wedges inside a bio-dome. Wild type cuttings are also taken simultaneously to serve as controls. The cuttings are kept in the bio-dome for 5-7 days and then transplanted to pots and then acclimated in the growth chamber for two more days. Subsequently, the cuttings are transferred to the greenhouse, acclimated for approximately 4 days, and then subjected to spray tests as indicated. Depending on the species, the plants are kept at 10-25° C. or 20-35° C. The test period extends over 3 weeks. During this time, the plants are tended and their response to the individual treatments is evaluated. Herbicide injury evaluations are taken at 2 and 3 weeks after treatment. Plant injury is rated on a scale of 0% to 100%, 0% being no injury and 100% being complete death.

[1567] Transgenic Arabidopsis thaliana plants are assayed for improved tolerance to methyl 2-[2-chloro-5-[3-chloro-5-(trifluoromethyl)-2-pyridyl]-4-fluoro-phenoxy]-2-methoxy-acetate, ethyl 2-[2-chloro-5-[3-chloro-5-(trifluoromethyl)-2-pyridyl]-4-fluoro-phenoxy]-2-methoxy-acetate, prop-2-ynyl 2-[2-chloro-5-[3-chloro-5-(trifluoromethyl)-2-pyridyl]-4-fluoro-phenoxy]-2-methoxy-acetate, saflufenacil, 1,5-dimethyl-6-thioxo-3-(2,2,7-trifluoro-3-oxo-4-(prop-2-ynyl)-3,4-dihydro-2H-benzo[b][1,4]oxazin-6-yl)-1,3,5-triazinane-2,4-dione (CAS 1258836-72-4), flumioxazin, butafenacil, acifluorfen, lactofen, bifenox, sulfentrazone, and photosynthesis inhibitor diuron as negative control, in 48-well plates. Therefore, T2 seeds are surface sterilized by stirring for 5 min in ethanol+water (70+30 by volume), rinsing one time with ethanol+water (70+30 by volume) and two times with sterile, deionized water. The seeds are resuspended in 0.1% agar dissolved in water (w/v) Four to five seeds per well are plated on solid nutrient medium consisting of half-strength murashige skoog nutrient solution, pH 5.8 (Murashige and Skoog (1962) Physiologia Plantarum 15: 473-497). Compounds are dissolved in dimethylsulfoxid (DMSO) and added to the medium prior solidification (final DMSO concentration 0.1%). Multi well plates are incubated in a growth chamber at 22° C., 75% relative humidity and 110 μmol Phot*m⁻²*s⁻¹ with 14:10 h light:dark photoperiod. Growth inhibition is evaluated seven to ten days after seeding in comparison to wild type plants.

[1568] Additionally, transgenic T2 Arabidopsis plants are tested for improved tolerance to herbicides in greenhouse studies with the following herbicides: methyl 2-[2-chloro-5-[3-chloro-5-(trifluoromethyl)-2-pyridyl]-4-fluoro-phenoxy]-2-methoxy-acetate, and photosynthesis inhibitor diuron as negative control. Results are shown in table A and FIG. 1.

[1569] Table A: Transgenic T2 Arabidopsis plants, four weeks old, were sprayed in the greenhouse with the indicated amount of compound+1% (v/v) MSO. Herbicide injury was evaluated 14 days after treatment with a 0 to 100% phytotox rating scale where 0 is no injury relative to an unsprayed wild type check and 100% is completely dead.

TABLE A

| | | methyl 2-[2-chloro-5-[3-chloro- | | |
|---|---|---|---|---|
| Seq ID NO 1 | | 5-(trifluoromethyl)-2-pyridyl]-4- | | |
| (AMATU) or | | fluoro-phenoxy]-2-methoxy- | | |
| 625 or 627 | | acetate [application rate, g ai/ha] | | |
| (ALOMY) | Construct | 200 | 100 | 50 |
| | non transformed | 100 | 100 | 100 |
| ALOMY_PPO2 | F438I | 79 | 64 | 48 |
| ALOMY_PPO2 | F438M | 69 | 43 | 30 |
| ALOMY_PPO2 | F438V | 69 | 55 | 36 |
| ALOMY_PPO2 | L415A_F438M | 39 | 28 | 23 |
| ALOMY_PPO2 | L415E_F438M | 43 | 29 | 15 |
| ALOMY_PPO2 | L415G_F438M | 59 | 46 | 36 |
| ALOMY_PPO2 | L415G_F438M | 46 | 34 | 26 |
| ALOMY_PPO2 | L415Q_F438M | 41 | 23 | 18 |
| ALOMY_PPO2 | R137L_F438L | 71 | 59 | 55 |
| ALOMY_PPO2 | R137L_F438M | 70 | 68 | 50 |
| ALOMY_PPO2 | R137L_F438V | 65 | 58 | 39 |
| AMATU_PPO2 | L397C_F420M | 71 | 63 | 58 |
| AMATU_PPO2 | L397E_F420M | 79 | 68 | 59 |
| AMATU_PPO2 | L397E_F420V | 85 | 76 | 60 |
| AMATU_PPO2 | L397G_F420M | 66 | 56 | 40 |
| AMATU_PPO2 | L397Q_F420M | 73 | 61 | 45 |
| AMATU_PPO2 | L397Q_F420V | 83 | 66 | 69 |
| AMATU_PPO2 | R128I_F420V | 80 | 66 | 64 |
| AMATU_PPO2 | R128L_F420L | 56 | 30 | 18 |
| AMATU_PPO2 | R128M_F420I | 91 | 83 | 63 |
| AMATU_PPO2 | R128M_F420L | 73 | 60 | 30 |
| AMATU_PPO2 | R128M_F420M | 100 | 85 | 100 |
| AMATU_PPO2 | R128M_F420V | 93 | 75 | 64 |
| SEQ ID NO: 245 | hemG_tp_FNR | 99 | 100 | 96 |
| SEQ ID NO: 246 | hemG_tp_long AMATU | 79 | 75 | 68 |
| OPITE_PPO | OPITE_PPO_wt_tpFNR | 100 | 100 | 100 |
| SEQ ID NO: 249 | | | | |
| CHLSP_PPO | CHLSP_PPO_wt_tpFNR | 95 | 97 | 91 |
| SEQ ID NO: 256 | | | | |

| | | methyl 2-[2-chloro-5-[3-chloro- | | |
|---|---|---|---|---|
| | | 5-(trifluoromethyl)-2-pyridyl]-4- | | |
| | | fluoro-phenoxy]-2-methoxy- | | |
| Seq ID NO 1 | | acetate [application rate, g ai/ha] | | |
| variant(AMATU) | Construct | 150 | 100 | 50 |
| | non transformed | 100 | 100 | 100 |
| AMATU_PPO2 | R128A_F420V | 73 | 69 | 51 |
| AMATU_PPO2 | L397D_F420V | 67 | 59 | 49 |
| Arabidopsis PPO1 | S305L_Y426M | 100 | 100 | 49 |

### Example 11: Herbicide Selection Using Tissue Culture

[1570] Media is selected for use and kill curves developed as specified above. For selection, different techniques are utilized. Either a step wise selection is applied, or an immediate lethal level of herbicide is applied. In either case, all of the calli are transferred for each new round of selection. Selection is 4-5 cycles of culture with 3-5 weeks for each cycle. Cali are placed onto nylon membranes to facilitate transfer (200 micron pore sheets, Biodesign, Saco, Me.). Membranes are cut to fit 100×20 mm Petri dishes and are autoclaved prior to use 25-35 calli (average weight/calli being 22 mg) are utilized in every plate. In addition, one set of calli are subjected to selection in liquid culture media with weekly subcultures followed by further selection on semi-solid media. Mutant lines are selected using methyl 2-[2-chloro-5-[3-chloro-5-(trifluoromethyl)-2-pyridyl]-4-fluoro-phenoxy]-2-methoxy-acetate, ethyl 2-[2-chloro-5-[3-chloro-5-(trifluoromethyl)-2-pyridyl]-4-fluoro-phenoxy]-2-methoxy-acetate, prop-2-ynyl 2-[2-chloro-5-[3-chloro-5-(trifluoromethyl)-2-pyridyl]-4-fluoro-phenoxy]-2-methoxy-acetate, saflufenacil, 1,5-dimethyl-6-thioxo-3-(2,2,7-trifluoro-3-oxo-4-(prop-2-ynyl)-3,4-dihydro-2H-benzo[b][1,4]oxazin-6-yl)-1,3,5-triazinane-2,4-dione (CAS 1258836-72-4), flumioxazin, butafenacil, acifluorfen, lactofen, bifenox, sulfentrazone, and photosynthesis inhibitor diuron as negative control. Efficiencies of obtaining mutants is high either based on a percentage of calli that gave rise to a regenerable, mutant line or the number of lines as determined by the gram of tissue utilized.

### Example 12: Maize Whole Plant Transformation and PPO Inhibitor Tolerance Testing

[1571] Immature embryos are transformed according to the procedure outlined in Peng et al. (WO2006/136596). Plants are tested for the presence of the T-DNA by Taqman analysis with the target being the nos terminator which is present in all constructs. Healthy looking plants are sent to the greenhouse for hardening and subsequent spray testing. The plants are individually transplanted into MetroMix 360 soil in 4″ pots. Once in the greenhouse (day/night cycle of 27° C./21° C. with 14 hour day length supported by 600 W high pressure sodium lights), they are allowed to grow for 14 days. T0 or T1 plants are sprayed with a treatment of 25 to 200 g ai/ha saflufenacil+1.0% v/v methylated seed oil (MSO) and/or 25-200 g ai/ha 1,5-dimethyl-6-thioxo-3-(2,2,7-trifluoro-3-oxo-4-(prop-2-ynyl)-3,4-dihydro-2 H-benzo[b][1,4]oxazin-6-yl)-1,3,5-triazinane-2,4-dione (CAS 1258836-72-4) plus 1% MSO. Other PPO inhibiting herbicides are also tested in a similar fashion for confirming cross resistance: flumioxazin, butafenacil, acifluorfen, lactofen, bifenox, sulfentrazone, methyl 2-[2-chloro-5-[3-chloro-5-(trifluoromethyl)-2-pyridyl]-4-fluoro-phenoxy]-2-methoxy-acetate, ethyl 2-[2-chloro-5-[3-chloro-5-(trifluoromethyl)-2-pyridyl]-4-fluoro-phenoxy]-2-methoxy-acetate, prop-2-ynyl 2-[2-chloro-5-[3-chloro-5-(trifluoromethyl)-2-pyridyl]-4-fluoro-phenoxy]-2-methoxy-acetate and photosynthesis inhibitor diuron as negative control. Herbicide injury evaluations are taken at 7, 14 and 21 days after treatment. Herbicide injury evaluations are taken 2, 7, 14 and 21 days post-spray to look for injury to new growth points and overall plant health. The top survivors are transplanted into gallon pots filled with MetroMix 360 for seed production.

TABLE B
Segregating and non-segregating T2 events expressing the indicated Amaranthus
PPO2 variant transgene. 4 individuals per line were treated with the indicated
amount of herbicide at the V2 stage and evaluated for injury on a 0-9 point
scale (0 = no injury; 9 = death) 3 days after treatment.

| Compound | | | | |
|---|---|---|---|---|
| methyl 2-[2-chloro-5-[3-chloro- | | | | |
| 5-(trifluoromethyl)-2-pyridyl]-4- | Transgene SEQ ID NO: 1 variant | | | |
| fluoro-phenoxy]-2-methoxy- | | | | Non |
| acetate g ai/ha + 1% v/v MSO | R128A_F420I | L397E_F420M | L397D_F420M | transgenic |
| 25 | 0 | 9 | 0 | 8 |
| | 1 | 9 | 3 | 9 |
| | 1 | 2 | 1 | 9 |
| | 0 | 0 | 0 | 9 |
| 50 | 2 | 0 | 0 | 9 |
| | 1 | 9 | 1 | 9 |
| | 0 | 9 | 1 | 9 |
| | 1 | 1 | 0 | 9 |
| 100 | 0 | | 0 | 9 |
| | 1 | 4 | 0 | 9 |
| | 1 | 1 | 0 | 9 |
| | 0 | 0 | 1 | 9 |
| 200 | 1 | 0 | 0 | 9 |
| | 1 | 6 | 0 | 9 |
| | 0 | 6 | 2 | 9 |
| | 1 | 5 | 1 | 9 |
| Formulation only | 0 | 1 | 0 | 4 |
| | 0 | 3 | 0 | 4 |
| | 0 | 0 | 0 | 4 |
| | 1 | 4 | | 5 |

### Example 13: Soybean Transformation and PPO Inhibitor Tolerance Testing

[1572] Soybean cv Jake is transformed as previously described by Siminszky et al., Phytochem Rev. 5:445-458 (2006). After regeneration, transformants are transplanted to soil in small pots, placed in growth chambers (16 hr day/8 hr night; 25° C. day/23° C. night; 65% relative humidity; 130-150 microE m-2 s-1) and subsequently tested for the presence of the T-DNA via Taqman analysis. After a few weeks, healthy, transgenic positive, single copy events are transplanted to larger pots and allowed to grow in the growth chamber. An optimal shoot for cutting is about 3-4 inches tall, with at least two nodes present. Each cutting is taken from the original transformant (mother plant) and dipped into rooting hormone powder (indole-3-butyric acid, IBA). The cutting is then placed in oasis wedges inside a bio-dome. The mother plant is taken to maturity in the greenhouse and harvested for seed. Wild type cuttings are also taken simultaneously to serve as negative controls. The cuttings are kept in the bio-dome for 5-7 days and then transplanted to 3 inch pots and then acclimated in the growth chamber for two more days. Subsequently, the cuttings are transferred to the greenhouse, acclimated for approximately 4 days prior to spray. T0 or 2-week old T1 plants are sprayed with a treatment of 0-200 g ai/ha saflufenacil plus 1% MSO and/or 25-200 g ai/ha 1,5-dimethyl-6-thioxo-3-(2,2,7-trifluoro-3-oxo-4-(prop-2-ynyl)-3,4-dihydro-2H-benzo[b][1,4]oxazin-6-yl)-1,3,5-triazinane-2,4-dione (CAS 1258836-72-4) plus 1% MSO. Other PPO inhibiting herbicides are also tested in a similar fashion for confirming cross resistance: flumioxazin, butafenacil, acifluorfen, lactofen, bifenox, sulfentrazone, methyl 2-[2-chloro-5-[3-chloro-5-(trifluoromethyl)-2-pyridyl]-4-fluoro-phenoxy]-2-methoxy-acetate, ethyl 2-[2-chloro-5-[3-chloro-5-(trifluoromethyl)-2-pyridyl]-4-fluoro-phenoxy]-2-methoxy-acetate, prop-2-ynyl 2-[2-chloro-5-[3-chloro-5-(trifluoromethyl)-2-pyridyl]-4-fluoro-phenoxy]-2-methoxy-acetate and photosynthesis inhibitor diuron as negative control. Herbicide injury evaluations are taken at 2, 7, 14 and 21 days after treatment. Results are shown in the following table.

TABLE C
Segregating and non-segregating T2 events expressing the indicated Amaranthus PPO2 variant transgene (SEQ ID NO: 1).

| | Treatment | | | | | | | |
|---|---|---|---|---|---|---|---|---|
| | (g ai/ha + | Transgene | | | | | | |
| | 1% v/v | R128A_F420I | R128A_F420I | R128A_F420I | | | | Non |
| Compound | MSO) | event 1 | event 2 | event 3 | R128A_F420V | L397E_F420M | L397Q_F420M | transgenic |
| methyl 2-[2- | 25 | 0 | 0 | 0 | 2 | 1 | 0 | 8 |
| chloro-5-[3- | | 0 | 9 | 0 | 1 | | 9 | 9 |
| chloro-5- | | 0 | | | | 1 | 1 | 9 |
| (trifluoromethyl)- | 50 | 1 | 3 | 1 | 4 | 3 | | 9 |
| 2-pyridyl]-4- | | 2 | 4 | 2 | | 4 | 9 | 9 |
| fluoro-phenoxy]- | | 2 | 3 | 0 | 9 | | 1 | 9 |
| 2-methoxy- | 100 | 2 | 1 | 1 | 4 | 3 | | 9 |
| acetate | | 3 | | | | 4 | 3 | 9 |
| | | 2 | 3 | 3 | | 9 | 3 | 9 |
| | 200 | 4 | 5 | | 9 | 3 | 3 | 9 |
| | | 4 | 5 | 4 | 4 | 3 | 9 | 8 |
| | | 3 | 4 | 4 | 5 | 4 | 4 | 9 |
| ethyl 2-[2- | 25 | 0 | 2 | | 0 | 0 | 1 | 9 |
| chloro-5-[3- | | 1 | 5 | 1 | | 0 | | 9 |
| chloro-5- | | 0 | 1 | 1 | | 9 | 9 | 9 |
| (trifluoromethyl)- | 50 | 0 | 1 | | | 0 | 9 | 9 |
| 2-pyridyl]-4- | | 0 | 2 | | 5 | 0 | 3 | 9 |
| fluoro-phenoxy]- | | 1 | | 1 | | 2 | 2 | 9 |
| 2-methoxy- | 100 | 4 | 5 | 3 | | 3 | | 9 |
| acetate | | 4 | 9 | 2 | 4 | 3 | | 9 |
| | | 4 | | | 4 | 9 | 2 | 9 |
| | 200 | 4 | 7 | 3 | 4 | 4 | 2 | 9 |
| | | 4 | 4 | 3 | | 3 | | 9 |
| | | 5 | 4 | 4 | 5 | 5 | 9 | 9 |
| prop-2-ynyl 2- | 25 | 0 | | | | 1 | 0 | 9 |
| [2-chloro-5-[3- | | | | 0 | 2 | 0 | 0 | 9 |
| chloro-5- | | 0 | 0 | 0 | | 9 | 0 | 9 |
| (trifluoromethyl)- | 50 | 2 | 2 | | 4 | 0 | 2 | 9 |
| 2-pyridyl]-4- | | 3 | 3 | | 5 | 1 | 1 | 9 |
| fluoro-phenoxy]- | | 4 | 2 | 2 | 4 | 0 | 0 | 9 |
| 2-methoxy- | 100 | 5 | 4 | 1 | 4 | 1 | 1 | 9 |
| acetate | | | 4 | | | | 2 | 9 |
| | | | 5 | | 4 | | 2 | 9 |
| | 200 | 5 | 5 | 3 | | 3 | 1 | 9 |
| | | 5 | 5 | 4 | | 3 | 2 | 9 |
| | | 4 | 5 | | | 4 | 1 | 9 |
| Formulation | 0 | 0 | 0 | | 1 | 1 | 1 | 0 |
| control | | | 0 | 0 | | | 1 | 2 |
| | | 0 | | | | | 0 | 1 |

4 individuals per line were treated with the indicated amount of herbicide at the V2 stage and evaluated for injury on a 0-9 point scale (0 = no injury; 9 = death) 3 days after treatment.

[1573] The following gives a definition of the injury scores measured above:

[1574] Score Description of injury

[1575] 0 No Injury

[1576] 1 Minimal injury, only a few patches of leaf injury or chlorosis.

[1577] 2 Minimal injury with slightly stronger chlorosis. Overall growth points remain undamaged.

[1578] 3 Slightly stronger injury on secondary leaf tissue, but primary leaf and growth points are still undamaged.

[1579] 4 Overall plant morphology is slightly different, some chlorosis and necrosis in secondary growth points and leaf tissue. Stems are intact. Regrowth is highly probable within 1 week.

[1580] 5 Overall plant morphology is clearly different, some chlorosis and necrosis on a few leaves and growth points, but primary growth point is intact. Stem tissue is still green. Regrowth is highly probably within 1 week.

[1581] 6 Strong injury can be seen on the new leaflet growth. Plant has a high probability to survive only through regrowth at different growth points. Most of the leaves are chlorotic/necrotic but stem tissue is still green. May have regrowth but with noticeable injured appearance.

[1582] 7 Most of the active growth points are necrotic. There may be a single growth point that could survive and may be partially chlorotic or green and partially necrotic. Two leaves may still be chlorotic with some green; the rest of the plant including stem is necrotic.

[1583] 8 Plant will likely die, and all growth points are necrotic. One leaf may still be chlorotic with some green. The remainder of the plant is necrotic.

[1584] 9 Plant is dead.

The application's sequence listing, which the Patent Office published only in electronic form, follows.

SEQUENCE LISTING (627 sequences)

SEQ ID NO: 1 - protein, 534 aa, Amaranthus
MVIQSITHLSPNLALPSPLSVSTKNYPVAVMGNISEREEPTSAKRVAVVGAGVSGLAAAYKLKSHGLSVTLFEADSRAGGKLKTVKKDGFIWDEGANTMTESEAEVSSLIDDLGLREKQQLPISQNKRYIARDGLPVLLPSNPAALLTSNILSAKSKLQIMLEPFLWRKHNATELSDEHVQESVGEFFERHFGKEFVDYVIDPFVAGTCGGDPQSLSMHHTFPEVWNIEKRFGSVFAGLIQSTLLSKKEKGGENASIKKPRVRGSFSFQGGMQTLVDTMCKQLGEDELKLQCEVLSLSYNQKGIPSLGNWSVSSMSNNTSEDQSYDAVVVTAPIRNVKEMKIMKFGNPFSLDFIPEVTYVPLSVMITAFKKDKVKRPLEGFGVLIPSKEQHNGLKTLGTLFSSMMFPDRAPSDMCLFTTFVGGSRNRKLANASTDELKQIVSSDLQQLLGTEDEPSFVNHLFWSNAFPLYGHNYDSVLRAIDKMEKDLPGFFYAGNHKGGLSVGKAMASGCKAAELVISYLDSHIYVKMDEKTA

SEQ ID NO: 2 - protein, 534 aa, Amaranthus
MVIQSITHLSPNLALPSPLSVSTKNYPVAVMGNISEREEPTSAKRVAVVGAGVSGLAAAYKLKSHGLSVTLFEADSRAGGKLKTVKKDGFIWDEGANTMTESEAEVSSLIDDLGLREKQQLPISQNKRYIARAGLPVLLPSNPAALLTSNILSAKSKLQIMLEPFLWRKHNATELSDEHVQESVGEFFERHFGKEFVDYVIDPFVAGTCGGDPQSLSMHHTFPEVWNIEKRFGSVFAGLIQSTLLSKKEKGGENASIKKPRVRGSFSFQGGMQTLVDTMCKQLGEDELKLQCEVLSLSYNQKGIPSLGNWSVSSMSNNTSEDQSYDAVVVTAPIRNVKEMKIMKFGNPFSLDFIPEVTYVPLSVMITAFKKDKVKRPLEGFGVLIPSKEQHNGLKTLGTLFSSMMFPDRAPSDMCLFTTFVGGSRNRKLANASTDELKQIVSSDLQQLLGTEDEPSFVNHLFWSNAFPLYGHNYDSVLRAIDKMEKDLPGFFYAGNHKGGLSVGKAMASGCKAAELVISYLDSHIYVKMDEKTA

SEQ ID NO: 3 - protein, 533 aa, Amaranthus
MVIQSITHLSPNLALPSPLSVSTKNYPVAVMGNISEREEPTSAKRVAVVGAGVSGLAAAYKLKSHGLSVTLFEADSRAGGKLKTVKKDGFIWDEGANTMTESEAEVSSLIDDLGLREKQQLPISQNKRYIARDGLPVLLPSNPAALLTSNILSAKSKLQIMLEPFLWRKHNATELSDEHVQESVGEFFERHFGKEFVDYVIDPFVAGTCGDPQSLSMHHTFPEVWNIEKRFGSVFAGLIQSTLLSKKEKGGENASIKKPRVRGSFSFQGGMQTLVDTMCKQLGEDELKLQCEVLSLSYNQKGIPSLGNWSVSSMSNNTSEDQSYDAVVVTAPIRNVKEMKIMKFGNPFSLDFIPEVTYVPLSVMITAFKKDKVKRPLEGFGVLIPSKEQHNGLKTLGTLFSSMMFPDRAPSDMCLFTTFVGGSRNRKLANASTDELKQIVSSDLQQLLGTEDEPSFVNHLFWSNAFPLYGHNYDCVLRAIDKMEKDLPGFFYAGNHKGGLSVGKAMASGCKAAELVISYLDSHIYVKMDEKTA

SEQ ID NO: 4 - protein, 533 aa, Amaranthus
MVIQSITHLSPNLALPSPLSVSTKNYPVAVMGNISEREEPTSAKRVAVVGAGVSGLAAAYKLKSHGLSVTLFEANSRAGGKLKTVKKDGFIWDEGANTMTESEAEVSSLIDDLGLREKQQLPISQNKRYIARDGLPVLLPSNPAALLTSNILSAKSKLQIMLEPFLWRKHNATELSDEHVQESVGEFFERHFGKEFVDYVIDPFVAGTCGDPQSLSMYHTFPEVWNIEKRFGSVFAGLIQSTLLSKKEKGGENASIKKPRVRGSFSFQGGMQTLVDTMCKQLGEDELKLQCEVLSLSYNQKGIPSLGNWSVSSMSNNTSEDQSYDAVVVTAPIRNVKEMKIMKFGNPFSLDFIPEVTYVPLSVMITAFKKDKVKRPLEGFGVLIPSKEQHNGLKTLGTLFSSMMFPDRAPSDMCLFTTFVGGSRNRKLANASTDELKQIVSSDLQQLLGTEDEPSFVNHLFWSNAFPLYGHNYDSVLRAIDKMEKDLPGFFYAGNHKGGLSVGKAMASGCKAAELVISYLDSHIYVKMDEKTA

SEQ ID NO: 5 - protein, 535 aa, Amaranthus
MVIQSITHLSPKLALPSPLSVSTKNYPVAVMGNISEREEPTSAKRVAVVGAGVSGLAAAYKLKSHGLNVTLFEADSRAGGKLKTVKKDGFIWDEGANTMTESEAEVSSLIDDLGLREKQQLPISQNKRYIARDGLPVLLPSNPAALLSSNILSAKSKLQIMLEPFLWRKRNATELSDEHVQESVGEFFERHFGKEFVDYVIDPFVAGTCGGDPQSLSVHHTFPDVWNVEKRFGSVFAGLIQSTLLSKKEKGGGENASIKKPRVRGSFSFHGGMQTLVDTMCKQIGEDELKLQCEVLSLSYNQKGIPSLGNWSVSSMSNNTSEDQSYDAVVVTAPIRNVKEMKIMKFGNPFSLDFIPEVTYVPLSVMITAFKKDKVKRPLEGFGVLIPSKEQHNGLKTLGTLFSSMMFPDRAPSDMCLFTTFVGGSRNRKLAKASTDELKQIVSSDLQQLLGTEDEPSFVNHLFWSNAFPLYGHNYDSVLRAIDKMEKDLPGFFYAGNHKGGLSVGKAMASGCKAAELVISYLDSHLYVKMNEKTA

SEQ ID NO: 6 - protein, 505 aa, Amaranthus
MGNISERDEPTSAKRVAVVGAGVSGLAAAYKLKSHGLNVTLFEADSRAGGKLKTVKKDGFIWDEGANTMTESEAEVSSLIDDLGLREKQQLPISQNKRYIARDGLPVLLPSNPAALLTSNILSAKSKLQIMLEPFFWRKHNATELSDEHVQESVGEFFERHFGKEFVDYVIDPFVAGTCGGDPQSLSMHHTFPEVWNIEKRFGSVFAGLIQSTLLSKKEKGGGGNASIKKPRVRGSFSFHGGMQTLVDTICKQLGEDELKLQCEVLSLSYNQKGIPSLGNWSVSSMSNNTSEDQSYDAVVVTAPIRNVKEMKIMKFGNPFSLDFIPEVSYVPLSVMITAFKKDKVKRPLEGFGVLIPSKEQHNGLKTLGTLFSSMMFPDRAPSDMCLFTTFVGGSRNRKLANASTDELKQIVSSDLQQLLGTEDEPSFVNHLFWSNAFPLYGHNYDSVLRAIDKMEKDLPGFFYAGNHKGGLSVGKAMASGCKAAELVISYLDSHIYVKMDEKTA

SEQ ID NO: 7 - protein, 531 aa, Spinacia
MVILPVSQLSTNLGLSLVSPTKNNPVMGNVSERNQVNQPISAKRVAVVGAGVSGLAAAYKLKSNGLNVTLFEADSRAGGKLKTVVKDGLIWDEGANTMTESDEEVTSLFDDLGIREKLQLPISQNKRYIARDGLPVLLPSNPVALLKSNILSAKSKLQIMLEPFLWKKHNGAKVSDENAQESVAEFFERHFGKEFVDYLIDPFVAGTSGGDPQSLSMRHAFPELWNIENRFGSVISGFIQSKLSSKKEKGGEKQSSNKKPRVRGSFSFQGGMQTLVDTICKEFGEDELKLQSEVLSLSYSHNGSLTSENWSVSSMSNSTIQDQPYDAVVVTAPINNVKELKIMKVENPFSLDFIPEVSCLPLSVIITTFKKTNVKRPLEGFGVLVPSNEQHNGLKTLGTLFSSMMFPDRAPSDVYLYTTFVGGSRNRELAKASTDELKQIVSSDLQQLLGTEGEPTFVNHFYWSKAFPLYGRNYDSVLRAIEKMERDLPGLFYAGNHKGGLSVGKSIASGYKAAELAISYLESNKMTEETI

SEQ ID NO: 8 - protein, 508 aa, Vicia
MAEKSDAQSHYNGSGKRVAVVGAGVSGLAAAYKLKLHGVNITLYEAEERAGGKLRSVSQHGLVWDEGANTMTESEIEVGSLLDNLRLREKQQFPISQNKRYIVRNGMPVLLPSNPIALIKSNILSAKSKFQIILEPFLWKKSDLSKVSDDHMKESVGGFFQRHFGKEVVDYLIDPFVAGTSGGDPESLSMHHTFPELWNLEKRFGSIIAGAVLSKLSAKREKRGETKGSSEKKKRQRGSFSFQGGMQTLTDTLCKELGKDKLRLKSKVLSLSYSHGEKSALENWSVAYASNPGKQSKDLSFDAVIMTAPLCNVREMKIMKKGNPFLLDFLPEVSYLPLSVIITTFKKENVKRPLEGFGVLVPSKEQQNGLKTLGTLFSSMMFPDRAPNDLYLYTTFIGGSRNRELAKASTDELKQIVTSDLRQLLGAEGEPTFVNHFYWSKAFPLFGHNYDSVLEAIDKMEKDLPGFFYAGNHKGGLSVGKAIASGCKAADLVISYLNSSSDGKMFKE

SEQ ID NO: 9 - protein, 511 aa, Ricinus <angiosperm>
MSSVIKEDRNPSHVKRVAVVGAGVSGLAAAYKLKSHGLKVTVFEAEERAGGKLRSVNHDGLIWDEGANTMTESEMEVKSLIGNLGIREKQQFPISQNKRYIVRNGKPILIPTNPIALITSNILSAQSKFQIILEPFLWKKRESSETHNAYTEESVGEFFQRHFGKEVVDYLIDPFVAGTSAGDPESLSVCHSFPELWNLEKRFGSIIAGVVQAKLSTKRGKSQETKGSSVKKKQQRGSFSFFGGMQTLTDTLCKALAKDELRLESKVFSLSYNPDSKSAVENWSLSYAFKGAKHLQNSSYDAIVMTAPLCNVKEMKITKNRNIFSLNFLPEVSYMPLSVVITTFKKDNVKSPLEGFGVLVPSKEQQNGLKTLGTLFSSMMFPDRAPNDLYLYTTFVGGSRNKELAKASTDDLKQIVTSDLRQLLGAEGEPTFVNHFYWSKAFPLYGRNYDAVLEAIDTMEKDLPGFFYAGNHKGGLSVGKAIASGCKAADLVISYLESSSDDKMLKEGPSN

SEQ ID NO: 10 - protein, 504 aa, Theobroma
MAAAKNKDKQTSAKRVAVVGAGVSGLAAAYKLKSHGLNVTMFEAEGRAGGKLRSVSQEGLIWDEGANTMTESEIEVRSLFDDLGIRDKQQVPIAQKKRYIVRNGVPVLIPSNPIALITSNILSAKSKFQIILEPFLWKKSDASKVSDAYNLESVGGFFQRHFGQEVVDYLIDPFVAGTSAGDPESLSMRHSFPELWDLEKRFGSIIVGAVKSKLSAKRENRGERKTSEKRKPLPGPFSFQGGMQTLTDMLCKDLSKDELKLKSKVLSLSYSHDGKSTLENWSLSYASDRDKRSQGSSFDAVVMTAPLCNVKEMKIMKGGKLFPLNFIPQVSYMPLSVIITTFKKENVKKPLEGFGVLVPSKEQQNGLKTLGTLFSSIMFPDRAPNNLYLYTTFVGGSRNKELAKASTDELKHIVTSDLRQLLGVEGEPTFLNHFYWSKAFPLYGRNYASVLKAIEKMETDLPGFFYAGNHKGGLSVGKAIASGCKAADLVISYLESSHQKLLKD

SEQ ID NO: 11 - protein, 502 aa, Glycine
MASSATDDNPRSVKRVAVVGAGVSGLAAAYKLKSHGLDVTVFEAEGRAGGRLRSVSQDGLIWDEGANTMTESEIEVKGLIDALGLQEKQQFPISQHKRYIVKNGAPLLVPTNPAALLKSKLLSAQSKIHLIFEPFMWKRSDPSNVCDENSVESVGRFFERHFGKEVVDYLIDPFVGGTSAADPESLSMRHSFPELWNLEKRFGSIIAGALQSKLFAKREKTGENRTALRKNKHKRGSFSFQGGMQTLTDTLCKELGKDDLKLNEKVLTLAYGHDGSSSSQNWSITSASNQSTQDVDAVIMTAPLYNVKDIKITKRGTPFPLNFLPEVSYVPISVMITTFKKENVKRPLEGFGVLVPSKEQKNGLKTLGTLFSSMMFPDRAPSDLYLYTTFIGGTQNRELAQASTDELRKIVTSDLRKLLGAEGEPTFVNHFYWSKGFPLYGRNYGSVLQAIDKIEKDLPGFFFAGNYKGGLSVGKAIASGCKAADLVISYLNSASDNTVPDK

SEQ ID NO: 12 - protein, 502 aa, Prunus
MTSLTTKEGSVKRVAVVGAGVSGLAAAYKLKSHGFDVTVFEAEGRAGGKLRSVSHDGLIWDEGANTMTESEKEVQTLLDDLGIREKQQFPISQNKRYIVRNGSPVLIPTNPIALIKSNFLSAQSKLQIILEPYLWKDKRVSDDHTEESVGGFFQRHFGEEVVDYLIDPFVAGTSAGDPESLSMRHSFPDIWNIEKRFGSVISGAIKSKLSASKGKSGETKGSVEKGKRQRGSFSFHGGMQTLTDILCNQLEKDELKLNSKVLSLSYRQGGNSASENWSVSRVADDDKHSQSLSVDALIMTAPLCNVKEMKITKRGTRFPLDFIPEVVYMPLSVIITTFKKENVKRPLEGFGVLVPSKEQKNGLKTLGTLFSSMMFPDRAPSDLYLYTTFVGGSRNKELAKASTDELKQIVTSDIRHLLGAEGEPTFVNHFYWSNAFPLYGRDYDSVIEAIENMEKNLPGFFYAGNHRGGLSVGKSIASGCKAAELVISYLESPSDEKTRHKG

SEQ ID NO: 13 - protein, 499 aa, Medicago
MASSAKDDNPRSVKRVAVVGAGVSGLAAAYKLKSHGLDVTVFEAEGRAGGRLRTVSRDGLVWDEGANTMTENEIEVKGLIDALGLHEKQQYPLSQHKRYIVKNGTPVLVPANPAALLKSKLLSAQSKIQVIFEPFMWKRSDSSAVRDENSEESVSRFFERHFGKEVVDYLIDPFVGGTSAAGPESLSIRHSFPELWNLEKRFGSIIAGALQSSVFGKKDKAGETKDVPRKNKHQRGSFSFQGGMQTLTDTLCKELGKDDIKLNAKVLTLAYSHDGSSPSQNWSITCTSNRKAQDVDAVIMTAPLGNVRDIQIKKKGNPFPLNFLPEVTYLPLSVLITTFKKENVKRPLEGFGVLVPSKEQQNGFKTLGTLFSSMMFPDRAPSDMHLYTTFIGGTRNRELAQASTDELTKIVTSDLRKLLGAEGEPAFVNHFFWSKGFPLYGHNYGSVLEAIDKMEKDLPGFFYAGNHRGGLSVGRAIASGCKAADLVISYLNNASDNSV

SEQ ID NO: 14 - protein, 506 aa, Fragaria
MASPSQPHNHRSVKKVAVVGAGVSGLAAAYKLKSHGFDVTVLEAEGRAGGKLRSVSYNGLIWDEGANTMTEAETEVQTLLDSLGLRDKQQFPISQNKRYVARNGMPVLLPTNPIELIKSNFLSTKSKFQILLEPYLWKKKKVSDDHTQESVAGFFQRHFGKEVVDYLIDPFVAGTSAGDPESLSMPHSFPELWNIEKRYGSVITGTIRSKVSSRKEKRGDTKGSVEKGKRQRGSFSFQGGMQTLTDTLCKQLGKHELKLNSKVLSLSYSHDGSSTSENWSLSCVANDDKHSQSSSVDAIIMTAPLCSIKEMKITRRGTIFPLDFLPEVNYMPLSVLITSFKKENIKRPLEGFGVLVPSKEQENGLKTLGTLFSSMMFPDRAPSDQYLYTTFVGGSRNKELAKASKDELKQIVTSDIRQLLGAEGEPTFVNHYYWSKAFPLYGHNYDSVIEAIEKMEKNLPGLFYAGNHRGGLSVGKAIASGCKAADLVISYLESSSDGKILQQGSS

SEQ ID NO: 15 - protein, 509 aa, Citrus
MASAPGEDNQRSAKRVAVVGAGVSGLAAAYKLKSNGVNVMVFEADERAGGKLRSISKDGLIWDEGANTMTESEMEVKGLLDDLGIREKQQFPISQYKRYVVRNGVPFLIPTNPIALITSNFLSAQSKFQIILEPFLWKKSDSAKVSAEDAKESVGGFFQRHFGREVVDFLIDPFVAGTSAADPESLVMRHSFPELWNLEKRYGSVIAGAIKSKFSARKEKSAEAKGSSEKKHRQRGSFSFLGGMQTLTDALCKALGKDEVCLKSKVLSLSYSHDGKSALENWSLSSSNQDKQSQGLSFDAVIMTASLCNVKEMKITKGGNLFPLDFLPEVIYMPLSVFITAFKKENVGKPLQGFGVLVPSKEQQNGLKTLGTLFSSMMFPDRAPKDLFLYTTFVGGSRNKELAKASTDELKQIVTSDLRQLLGVEGEPTFVNHFFWSKAFPLYGRDYDSVLEAIEKMEKNLPGFFYAGNHKGGLSVGKSIASGCKAAELVISYLENSSDDKMLKEGSSK

SEQ ID NO: 16 - protein, 509 aa, Citrus
MTNKWRVDFSGSAKRVAVVGAGVSGLAAAYKLKSNGVNVMVFEADERAGGKLRSISKDGLIWDEGANTMTESEMEVKGLLDDLGIREKQQFPISQYKRYVVRNGVPFLIPTNPIALITSNFLSAQSKFQIILEPFLWKKSDSAKVSAEDAKESVGGFFQRHFGREVVDFLIDPFVAGTSAADPESLVMRHSFPELWNLEKRYGSVIAGAIKSKFSARKEKSAEAKGSSEKKHRQRGSFSFLGGMQTLTDALCKALGKDEVCLKSKVLSLSYSHDGKSALENWSLSSSNQDKQSQGLSFDAVIMTASLCNVKEMKITKGGNLFPLDFLPEVIYMPLSVFITAFKKENVGKPLQGFGVLVPSKEQQNGLKTLGTLFSSMMFPDRAPKDLFLYTTFVGGSRNKELAKASTDELKQIVTSDLRQLLGVEGEPTFVNHFFWSKAFPLYGRDYDSVLEAIEKMEKNLPGFFYAGNHKGGLSVGKSIASGCKAAELVISYLENSSDDKMLKEGSSK

SEQ ID NO: 17 - protein, 502 aa, Cicer
MASSAKDNNSRSVKRVAVVGAGVSGLAAAYKLKSHGLDVTVFEAEGRAGGRLRTVSRDGLVWDEGANTMTENEAEVKSLIDALGLQEKQQYPLSQHKRYIVKNGMPLLVPANPAALLKSKLLSAQSKIRVIFEPFMWKRSDSSTVCDENSEESVSRFFERHFGKEVVDYLIDPFVGGTSAADPESLSMRHSFPELWNLEKRFGSIIGGALQSNLFGKRDKTGETKDAPRKSKHQRGSFSFQGGMQTLTDTLCKELGKDNLKLNAKVLTLAYSHNGSSPSENWSITCASNLTTQDVDAVIMTAPLGNVKDIQITKRGTPFTLNFFPEVTYLPLSVLITTFKKENVKRPLEGFGVLVPSKEEQNGFKTLGTLFSSMMFPDRAPSDLHLYTTFIGGTRNRELAQASTDELKKIVTSDLRKLLGAEGEPTFVNHFYWSKGFPLYGHNYGLVLEAIDKMEKGLPGFFYAGNHRGGLSVGRAIASGCKAADLVISYLNNASDNTVADK

SEQ ID NO: 18 - protein, 502 aa, Cucumis
MASPAKQDRRTSRKKVAVVGAGVSGLAAAYKLKSHGFDVTVLEADERVGGKLRSVSYKGLIWDEGANTMTESEPEVQCLLDDLGLREKQQFPISQNKRYIVRNGVPVLVPTNPIALIKSNFLSAKSKFQIILEPFLWKKYDSSKVSDDGTDESVGGFFQRHFGQEVVDYLIDPIVAGTSAGDPDSLSMSHSFPELWNIEKRFGSIFAGLVLSKLSTKKESGGVRNGTTGKSKPRRGSFSFQNGMQTLTDTLSKELGEGVLKLRSEVLSLSYNAGKYASQNWSLIYSKDKNSKDLIADAVIMTAPVCSVREMKFMKGGIPFSLNFLPEVAYMPLSVMITTFRKESVKRPLEGFGVLVPSSEQQNGLRTLGTLFSSMMFPNRASNDEYLYTTFIGGSRNRELAKSSTDELKQIVTTDLRQLLGVEGEPTFINHFYWSKAFPLYGRNYDSVVKAIETMEKNLPGFFYAGNHRDGLSVGKSIASGCKAADLVISYLESSTDQSCAE

SEQ ID NO: 19 - protein, 497 aa, Cucumis
MKSSQSSRKKVAVVGAGVSGLAAAYKLKSHGFDVTVLEADERVGGKLRSVSYKGLIWDEGANTMTESEPEVQCLLDDLGLREKQQFPISQNKRYIVRNGVPVLVPTNPIALIKSNFLSAKSKFQIILEPFLWKKYDSSKVSDDGTDESVGGFFQRHFGQEVVDYLIDPIVAGTSAGDPDSLSMSHSFPELWNIEKRFGSIFAGLVLSKLSTKKESGGVRNGTTGKSKPRRGSFSFQNGMQTLTDTLSKELGEGVLKLRSEVLSLSYNAGKYASQNWSLIYSKDKNSKDLIADAVIMTAPVCSVREMKFMKGGIPFSLNFLPEVAYMPLSVMITTFRKESVKRPLEGFGVLVPSSEQQNGLRTLGTLFSSMMFPNRASNDEYLYTTFIGGSRNRELAKSSTDELKQIVTTDLRQLLGVEGEPTFINHFYWSKAFPLYGRNYDSVVKAIETMEKNLPGFFYAGNHRDGLSVGKSIASGCKAADLVISYLESSTDQSCAE

SEQ ID NO: 20 - protein, 504 aa, Nicotiana
MAPSAGEDKHSSAKRVAVIGAGVSGLAAAYKLKIHGLNVTVFEAEGKAGGKLRSVSQDGLIWDEGANTMTESEGDVTFLIDSLGLREKQQFPLSQNKRYIARNGTPVLLPSNPIDLIKSNFLSTGSKLQMLLEPILWKNKKLSQVSDSHESVSGFFQRHFGKEVVDYLIDPFVAGTCGGDPDSLSMHHSFPELWNLEKRFGSVILGAIRSKLSPKNEKKQGPPKTSANKKRQRGSFSFLGGMQTLTDAICKDLREDELRLNSRVLELSCSCTEDSAIDSWSIISASPHKRQSEEESFDAVIMTAPLCDVKSMKIAKRGNPFLLNFIPEVDYVPLSVVITTFKRENVKYPLEGFGVLVPSKEQQHGLKTLGTLFSSMMFPDRAPNNVYLYTTFVGGSRNRELAKASRTELKEIVTSDLKQLLGAEGEPTYVNHLYWSKAFPLYGHNYDSVLDAIDKMEKNLPGLFYAGNHRGGLSVGKALSSGCNAADLVISYLESVSTDSKRHC

SEQ ID NO: 21 - protein, 501 aa, Solanum
MAPSAGEDKQKRVAVIGAGVSGLAAAYKLKVHGLNVTVFEAEGRAGGKLRSLSQDGLIWDEGANTMTESEGDVTFLLDSLGLREKQQFPLSQNKRYIARNGTPTLIPSNPFDLFKSNFLSTGSKLQMLFEPLLWKNKKLTKVSDKHESVSGFFQRHFGKEVVDYLIDPFVAGTCGGDPDSLSMHLSFPDLWNLEKRFGSVIVGAIQSKLSPIKEKKQGPPRTSINKKRQRGSFSFLGGMQTLTDAICKNLKEDELRLNSRVLELSCSCSGDSAIDSWSIFSASPHKRQAEEESFDAVIMTAPLCDVKSMKIAKRGNPFLLNFIPEVDYVPLSVVITTFKKESVKHPLEGFGVLVPSQEQKHGLKTLGTLFSSMMFPDRAPNNVYLYTTFVGGSRNRELAKASRTELKEIVTSDLKQLLGAEGEPTYVNHLCWSKAFPLYGHNYDSVLDAIDKMEKSLPGLFYAGNHKGGLSVGKALSSGCNAADLVISYLEAVSADTKNHS

SEQ ID NO: 22 - protein, 508 aa, Arabidopsis
MASGAVADHQIEAVSGKRVAVVGAGVSGLAAAYKLKSRGLNVTVFEADGRVGGKLRSVMQNGLIWDEGANTMTEAEPEVGSLLDDLGLREKQQFPISQKKRYIVRNGVPVMLPTNPIELVTSSVLSTQSKFQILLEPFLWKKKSSKVSDASAEESVSEFFQRHFGQEVVDYLIDPFVGGTSAADPDSLSMKHSFPDLWNVEKSFGSIIVGAIRTKFAAKGGKSRDTKSSPGTKKGSRGSFSFKGGMQILPDTLCKSLSHDEINLDSKVLSLSYNSGSRQENWSLSCVSHNETQRQNPHYDAVIMTAPLCNVKEMKVMKGGQPFQLNFLPEINYMPLSVLITTFTKEKVKRPLEGFGVLIPSKEQKHGFKTLGTLFSSMMFPDRSPSDVHLYTTFIGGSRNQELAKASTDELKQVVTSDLQRLLGVEGEPVSVNHYYWRKAFPLYDSSYDSVMEAIDKMENDLPGFFYAGNHRGGLSVGKSIASGCKAADLVISYLESCSNDKKPNDSL

SEQ ID NO: 23 - protein, 512 aa, Arabidopsis
MESGAVGDHDTKFESISGKRVAVVGAGVSGLAAAYKLKSRGLNVTVFEADERAGGKLTSVMQNGLIWDQGANTMTEAEPEVGSLLDDLGLRDKQQFPISQKKRYIVRNGLPMMLPTNPIELVTSSVLSTQAKIQILLEPFLWKKNDSSSKVSDASAEESVSGFFQRHFGQEVVDYLIDPFVGGTSAADPDSLSMKHSFPDLWNVEKSFGSIIVGAIRTKLAAKGGKSGEAKSSPGTKRGSRRSFSFKGGMQILPDMLCKSLSHDEINLDSKVLSLSYNSGSRQENWSLSCVSHNETQRQNLHYDAVVMTAPLCNVKEMKVTKGGQPFLLNFLPEINYMPLSVLITTFTKEKVKRPLEGFGVLIPSKEKKHGFKTLGTLFSSMMFPDRCPSDLHLYTTFIGGSRNQELAKASTDELKQVVTSDLQRLLGVEGEPVSVNHYYWRKAFPLYDSSYGSVMEAIDKMEKDLPGFFYAGNHRGGLSIGKSIASGCKAADLVISYLESCSNDKKPDESL

SEQ ID NO: 24 - protein, 501 aa, Arabidopsis
MASGAVADHQIEAVSGKRVAVVGAGVSGLAAAYKLKSRGLNVTVFEADGRVGGKLRSVMQNGLIWDEGANTMTEAEPEVGSLLDDLGLREKQQFPISQKKRYIVRNGVPVMLPTNPIELVTSSVLSTQSKFQILLEPFLWKKKSSKVSDASAEESVSEFFQRHFGQEVVDYLIDPFVGGTSAADPDSLSMKHSFPDLWNSFGSIIVGAIRTKFAAKGGKSRDTKSSPGTKKGSRGSFSFKGGMQILPDTLCKSLSHDEINLDSKVLSLSYNSGSRQENWSLSCVSHNETQRQNPHYDAAPLCNVKEMKVMKGGQPFQLNFLPEINYMPLSVLITTFTKEKVKRPLEGFGVLIPSKEQKHGFKTLGTLFSSMMFPDRSPSDVHLYTTFIGGSRNQELAKASTDELKQVVTSDLQRLLGVEGEPVSVNHYYWRKAFPLYDSSYDSVMEAIDKMENDLPGFFYAGNHRGGLSVGKSIASGCKAADLVISYLESCSNDKKPNDSL

SEQ ID NO: 25 - protein, 547 aa, Arabidopsis
MGLIKNGTLYCRFGISWNFAAVFFSTYFRHCFRLVRDFDSELLQIAMASGAVADHQIEAVSGKRVAVVGAGVSGLAAAYKLKSRGLNVTVFEADGRVGGKLRSVMQNGLIWDEGANTMTEAEPEVGSLLDDLGLREKQQFPISQKKRYIVRNGVPVMLPTNPIELVTSSVLSTQSKFQILLEPFLWKKKSSKVSDASAEESVSEFFQRHFGQEVVDYLIDPFVGGTSAADPDSLSMKHSFPDLWNSFGSIIVGAIRTKFAAKGGKSRDTKSSPGTKKGSRGSFSFKGGMQILPDTLCKSLSHDEINLDSKVLSLSYNSGSRQENWSLSCVSHNETQRQNPHYDAAPLCNVKEMKVMKGGQPFQLNFLPEINYMPLSVLITTFTKEKVKRPLEGFGVLIPSKEQKHGFKTLGTLFSSMMFPDRSPSDVHLYTTFIGGSRNQELAKASTDELKQVVTSDLQRLLGVEGEPVSVNHYYWRKAFPLYDSSYDSVMEAIDKMENDLPGFFYAGNHRGGLSVGKSIASGCKAADLVISYLESCSNDKKPNDSL

SEQ ID NO: 26 - protein, 467 aa, Ambrosia
GCAAAYKLKLHGLNVTVFEADERVGGKLRSVSQDGLIWDEGANTMTESEADVSSLIDDLGLRDKQQFPISQHKRYIVRNGKPVLIPSNPIALIRSSFLSTQSKVQILLEPFLWKKTKSSDEPESVGGFFQRHFGKEVVEYLIDPVVAGTSGGDPESLSMRHAFPELWDLERRFGSIISGAFQSMVSSRGGKRKPSGNSKRRRGSFSFFGGMQTLTDALSKEIGPHEINLQSKVLEMSYSCDDNAVGNWSIYCAPDQNKQFQQSFDAVIMTAPLNNLKEMKITKTGSPFLLNFIPEVSYLPISVIISTFKKENVKQPLEGFGVLVPAKEQENGLRTLGTLFSSMMFPDRASEDVYLYTTFVGGSRNKELAKASRDELKQIVTSDLRQLLGTEGEPKFLTHYYWSKAFPLYGRDYGSVIEAIEKMEKELPGYFYAGNHKGGLSVGKAISSGCKAAESVIAYLDSYSNQK

SEQ ID NO: 27 - protein, 542 aa, Setaria <grass>
MLSSSTTTASPASSHPYRPAYPRASLRPVLAMAGSDDPRAAPARSVAVIGAGVSGLAAAYRLRKSGVNVTVFEAADRAGGKIRTNSEAGFLWDEGANTMTEGELEVSRLIDDLGLQDRQQYPNSQHKRYIVKDGAPALIPADPISLMKSSVLSTKSKLALFLEPFLYKKSNTRNSGKVSDEHLSESVGSFFERHFGREVVDYLIDPFVAGTSAGDPESLSIRHAFPALWNLERKYHSIIVGAILSKLTAKGDPVKTGSDLSGKRRNRRASFSFHGGMQSLINALHNEVGDDNVKLGTEVLSLACTFDGLPSTGGWSISVDSKDAGSKDLAKNQTFDAVIMTAPLSNVQRMKFRKGGAPFVLDFLPKVNYLPLSLMVTAFKKEDVKKPLEGFGVLIPYKEQQKHGLKTLGTLFSSMMFPDRAPDDQYLYTTFVGGSHNRDLAGAPTSILKQLVTSDLKKLLGVEGQPTFVKHIYWRNAFPLYGRDYGSVLDAIEKMEKNLPGFFYAGNNKDGLAVGNVIASGSKAAELAISYLESQTKHNNSH

SEQ ID NO: 28 - protein, 544 aa, Sorghum <genus>
MLARTATVSSTSSHSHPYRPTSARSLRLRPVLAMAGSDDSRAAPARSVAVVGAGVSGLVAAYRLRKSGVNVTVFEAADRAGGKIRTNSEGGFLWDEGANTMTEGELEASRLIDDLGLQDKQQYPNSQHKRYIVKDGAPALIPSDPISLMKSSVLSTKSKIALFFEPFLYKKANTRNPGKVSDEHLSESVGSFFERHFGREVVDYLIDPFVAGTSAGDPESLSICHAFPALWNLERKYGSVVVGAILSKLTAKGDPVKTRRDSSAKRRNRRVSFSFHGGMQSLINALHNEVGDDNVKLGTEVLSLACTLDGAPAPGGWSISDDSKDASGKDLAKNQTFDAVIMTAPLSNVQRMKFTKGGAPFVLDFLPKVDYLPLSLMVTAFKKEDVKKPLEGFGVLIPYKEQQKHGLKTLGTLFSSMMFPDRAPDDQYLYTTFVGGSHNRDLAGAPTSILKQLVTSDLKKLLGVQGQPTFVKHIYWGNAFPLYGHDYNSVLEAIEKMEKNLPGFFYAGNNKDGLAVGSVIASGSKAADLAISYLESHTKHNNLH

SEQ ID NO: 29 - protein, 477 aa, Arabidopsis
MASGAVADHQIEAVSGKRVAVVGAGVSGLAAAYKLKSRGLNVTVFEADGRVGGKLRSVMQNGLIWDEGANTMTEAEPEVGSLLDDLGLREKQQFPISQKKRYIVRNGVPVMKKSSKVSDASAEESVSEFFQRHFGQEVVDYLIDPFVGGTSAADPDSLSMKHSFPDLWNVEKSFGSIIVGAIRTKFAAKGGKSRDTKSSPGTKKGSRGSFSFKGGMQILPDTLCKSLSHDEINLDSKVLSLSYNSGSRQENWSLSCVSHNETQRQNPHYDAVIMTAPLCNVKEMKVMKGGQPFQLNFLPEINYMPLSVLITTFTKEKVKRPLEGFGVLIPSKEQKHGFKTLGTLFSSMMFPDRSPSDVHLYTTFIGGSRNQELAKASTDELKQVVTSDLQRLLGVEGEPVSVNHYYWRKAFPLYDSSYDSVMEAIDKMENDLPGFFYAGNHRGGLSVGKSIASGCKAADLVISYLESCSNDKKPNDS

SEQ ID NO: 30 - protein, 544 aa, Zea
MLALTASASSASSHPYRHASAHTRRPRLRAVLAMAGSDDPRAAPARSVAVVGAGVSGLAAAYRLRQSGVNVTVFEAADRAGGKIRTNSEGGFVWDEGANTMTEGEWEASRLIDDLGLQDKQQYPNSQHKRYIVKDGAPALIPSDPISLMKSSVLSTKSKIALFFEPFLYKKANTRNSGKVSEEHLSESVGSFCERHFGREVVDYFVDPFVAGTSAGDPESLSIRHAFPALWNLERKYGSVIVGAILSKLAAKGDPVKTRHDSSGKRRNRRVSFSFHGGMQSLINALHNEVGDDNVKLGTEVLSLACTFDGVPALGRWSISVDSKDSGDKDLASNQTFDAVIMTAPLSNVRRMKFTKGGAPVVLDFLPKMDYLPLSLMVTAFKKDDVKKPLEGFGVLIPYKEQQKHGLKTLGTLFSSMMFPDRAPDDQYLYTTFVGGSHNRDLAGAPTSILKQLVTSDLKKLLGVEGQPTFVKHVYWGNAFPLYGHDYSSVLEAIEKMEKNLPGFFYAGNNKDGLAVGSVIASGSKAADLAISYLESHTKHNNSH

SEQ ID NO: 31 - protein, 544 aa, Zea
MLALTASASSASSHPYRHASAHTRRPRLRAVLAMAGSDDPRAAPARSVAVVGAGVSGLAAAYRLRQSGVNVTVFEAADRAGGKIRTNSEGGFVWDEGANTMTEGEWEASRLIDDLGLQDKQQYPNSQHKRYIVKDGAPALIPSDPISLMKSSVLSTKSKIALFFEPFLYKKANTRNSGKVSEEHLSESVGSFCERHFGREVVDYFVDPFVAGTSAGDPESLSIRHAFPALWNLERKYGSVIVGAILSKLAAKGDPVKTRHDSSGKRRNRRVSFSFHGGMQSLINALHNEVGDDNVKLGTEVLSLACTFDGVPALGRWSISVDSKDSGDKDLASNQTFDAVIMTAPLSNVRRMKFTKGGAPVVLDFLPKMDYLPLSLMVTAFKKDDVKKPLEGFGVLIPYKEQQKHGLKTLGTLFSSMMFPDRAPDDQYLYTTFVGGSHNRDLAGAPTSILKQLVTSDLKKLLGVEGQPTFVKHVYWGNAFPLYGHDYSSVLEAIEKMEKNLPGFFYAGNSKDGLAVGSVIASGSKAADLAISYLESHTKHNNSH

SEQ ID NO: 32 - protein, 509 aa, Lemna perpusilla
MEADAGKGSAGGAQILSHDSVRSVAVIGGGISGLAAAYKLKSNGFRAVVFEAEGKAGGKIRSGSQEGLIWDEGANTMAESVEAGELFDDVGIREKQQYPLSQSKRYVVRNGVPVMIPSDPISLIKSNLLSTKAKFRMFLEPFFSYRRVKPSKVSDEKLSESVGEFFQRHFGKEVVDYLIDPFVAGTSGGDPESLSMPHAFPEIWNLQEKYGSVILGAIQSKFLDKRKGDRTERATVKKRRPRGSFSFHGGMQTLIDVLCAKVGEENLELNSKVLSLACGHEGDPSFDSWSISVASNNGSQKDLLTKSFFDAVIMTAPLGNVEDMKFTKKGSPFALDFLPQVTYLPLSVLITSFKRENVKRPLEGFGVLVPSKEQEGGFKTLGTLFSSAMFPDRAPSDQYLYTTFIGGSRNRDLAGASLEELKQIVLSDLHKLLGVVGEPSFIKHVYWSKAFPLYGRDYGLVMEAIDRMERNLPGFYYAGNHRDGLSVGKAIASGFRAADLAISYINSSV

SEQ ID NO: 33 - protein, 544 aa, Lemna perpusilla
MASSAAISPLHFSPAPPRRRELSHRCRVRCSIAGKPPATAANDSSATSVTGGEPVRRLRADCVIVGAGISGLCTAQALTVRPAAGRSSAPDVLVTEARDRVGGNITTVERDGYLWEEGPNSFQPSDAVLTMAVDSGLKDDLVLGDPDAPRFVLWKGKLRPVPAKPTDLPFFDLMSIGGKIRAGFGALGLRPSPPSREESVEEFVRRNLGDEVFERLIEPFCSGVYAGDPSKLSMKAAFGKVWKLEQTGGSIIGGTFKAIQERSKNPKPPRDPRLPTPKGQTVGSFSKGLAMLPNAIASRLGDKVKLSWKLSGIKKSENGGYALTYDTPEGLTSVNADCVVLTIPSYVAGDLLRPLSNEAADALTKFYYPPVAAVTISYPSDSIRSECLIDGQLKGFGQLHPRSQGVETLGTIYSSSLFPNRAPPGRVLLLNYIGGSTNTAIVSKTESELVEAVDRDLRKMLVKVNAADPAVQGVRVWPRAIPQFLIGHTDLLDAATRSLDRAGYGGLILGGNYVAGVALGRCIEGAYDTAAKVNSFLSKYARSF

SEQ ID NO: 34 - protein, 482 aa, Populus
MTAAAKDDDFGSKQSKNVAVIGAGVSGLAAAYKLKSNGVKVTVFEAEGRAGGKLRSVSHHDLVWDEGANTMTESEVEVKSLLDDLGLREKQQFPIAQNKRYIVRNGMPVLIPTNPVALIKSNFLSAQSKLQIILEPFLWKKNESSKVSDADIQESVGEFFQRHFGKEVVDYLIDPFVAGTSAGDPESLSARHNFPDLWNLEKRFGSIIAGAVKAKLSAKKEKNGEKKGSSEKKKRQHGSFSFLGGMQTLTDTLCTELGKDGVKLESKVLSLSYSYDGKSTFENWSVSYASKGGKHAQASSYDAVIMTAPLCNVKEININKGRNRFSLDFLPQMSYMPLSVIITTFKKEDVKRPLEGFGVLVPSKEQQNGLKTLGTLFSSMMFPDRAPKDSYLYTTFVASTVLDCSHYYWSKAFPLYGKNYDLVLEGIERMEKNLPGFFYAGNHRGGLSVGKAIASGCKAADLVISHLNSSADDKMLKKGSQS

SEQ ID NO: 35 - protein, 569 aa, Capsella <angiosperm>
MHDAGDSHDPFEIHKHVDVELKSGLDAKTLNKGPLDKRLKIIGPEELKTRFDAELSWLLLITMASAKVADNDTKFEAVSGRRVAVVGGGVSGLAAAYKLKSKGLNVTVFEADGRAGGKLRSVMHNGLIWDEGANTMTEAEPEVGTLLDDLGLREKQQFPISQKKRYIVRNGVPVMIPTNPIDLVTSTVLSTQSKFEILLEPFLWKKNDLSSKVSDASAAESVSGFFRRHFGQEVVDYLIDPFVGGTSAADPDSLSIVFVYCLILLILISLPTIHDQMKHSFPDLWNVEKSFGSVIVGAIRTKLAAKGVQILPDMLCKGLSHDELNLDSKVLSLSYNSGSRQENWSLSCVSHNEMQRQNLHYDAVIMTAPLCNVKEMDVMKGGQPFQLNFLPEIKYMPLSVIITTFTKEKVKRPLEGFGVLIPSKEQKHGFKTLGTLFSSMMFPDRCPSDLHLYTTFIGGSRNQELAKASTDELKQVVTSDLQRLLGVEGEPEFVNHYYWRKAFPLYDSSYDSVMEAIDKMEKDLPGFFYAGNHRGGLSVGKSIASGCKAADLVISYLESCSNDKKPEDS

SEQ ID NO: 36 - protein, 544 aa, Brachypodium
MLTSATASPSASTRFSSTCRPCRSDSVPARRPRPVLAMAASDDPRAAPARSVAVVGAGVSGLVAAHRLRKSGVRVTVFEADDRAGGKIRTNSDSGFLWDEGANTMTESALEASRLIDDLGLQDKQQYPNSQHKRYTVKDGAPTLIPSDPIALMKSTVLSTKSKFKLFLEPFLYEKSHTRNSQKVSDNHLSESVGSFFERHFGKEVVDYLIDPFVAGTSAGDPESLSIRHAFPGLWDLEKKYGSIIVGAILSKLTAKGDSTKKADTSSGKGRNKQASFSFHGGMQTLVEGLHKDVGDGNVKLGTQVLSLACSCDRLSASDGWSISVNSKDASSKLAAKNQLFDAVIMTAPLSNVQRMKFTKGGVPFVLDFLPKVDYLPLSLMVTAFRKEDVKRPLEGFGVLIPYKEQQKYGLKTLGTLFSSMMFPDRAPNDQHLFTTFVGGSHNRDLAAAPTAILKQLVTSDLRKLLGVEGQPTFVKHVHWKNAFPLYGHDYDLALEAIGKMENELPGFFYAGNNKDGLAVGNVIASGSKTADLVISYLESHQAR

SEQ ID NO: 37 - protein, 506 aa, Oryza
MAASDDPRGGRSVAVVGAGVSGLAAAYRLRKRGVQVTVFEAADRAGGKIRTNSEGGFIWDEGANTMTESELEASRLIDDLGLQGKQQYPNSQHKRYIVKDGAPTLIPSDPIALMKSTVLSTKSKLKLFLEPFLYEKSSRRTSGKVSDEHLSESVIFLCICRDNQVVDYLIDPFVAGTSGGDPESLSIRHAFPALWNLENKYGSVIAGAILSKLSTKGDSVKTGGASPGKGRNKRVSFSFHGGMQSLIDALHNEVGDGNVKLGTEVLSLACCCDGVSSSGGWSISVDSKDAKGKDLRKNQSFDAVIMTAPLSNVQRMKFTKGGVPFVLDFLPKVDYLPLSLMVTAFKKEDVKKPLEGFGALIPYKEQQKHGLKTLGTLFSSMMFPDRAPNDQYLYTSFIGGSHNRDLAGAPTAILKQLVTSDLRKLLGVEGQPTFVKHVHWRNAFPLYGQNYDLVLEAIAKMENNLPGFFYAGNNKDGLAVGNVIASGSKAADLVISYLESCTDQDN

SEQ ID NO: 38 - protein, 494 aa, Picea
MAEHIHTDQNDKRPLKSVAVVGAGISGLAAAYRLKSQGLAVTIFEADGTTGGKIKSFAQNGLIWEKGANTMTETEPEVGKLIDDLGIRGKQQFPIMQSKRYIVRDGKPQLLPSNPVAFIGSKTLSAQAKLNIFLEPILWKHKNSKEKTPNSPDIYQEESVGDFFRRHFGQEVVDYIVDPFVAGTAGADAESLSIRHMFPEIWDLEERFGSIITGAIKSSWSRKKAQRDAKHVTHGQKRQRGSFSFMGGLQTLTNALSKKLGEESLRMHCSVLSLSCNLQGNPPHNNWSVCYARNDASYKEPLKEQSFDAVVMTVTYLPMSIIITTFKKQDVKHPLEGFGILVPSKEEKNGFQTLGTLFSSNMFPDRAPTDQYLFTTFIGGNRNRKLAKSQLKDLQEVAVNDLNKILGVGSDPLSVKHIYWNEAFPLYSLDYNSVVAAIDKLGKSLPGIYFAGNYRGGLSVGKALTSGFKAADLAISDFNSKGLCTMIGTDHEVK

SEQ ID NO: 39 - protein, 404 aa, Solanum
MAPSAGEDKQNCPKRVAVIGAGVSGLAAAYKLKIHGLNVTVFEAEGRAGGKLRSLSQDGLIWDEGANTMTESEGDVTFLLDSLGLREKQQFPLSQNKRYIARNGTPTLIPSNPIDLIKSNFLSTGSKLQMLFEPLLWKNNKLTKVSDEHESVSGFFQRHFGKEVVDYLIDPFVAGTCGGDPDSLSMHLSFPELWNLEKRFGSVIVGAIRSKLSPIKEKKQGPPKTSVNKKRQRGSFSFLGGMQTLTDAICKDLKEDELRLNSRVLELSCSCSGDSAIDSWSIFSASPHKRQAEEESFDAVIMTAPLCDVKSMKIAKRGNPFLLNFIPEVDYVPLSVVITTFKKESVKHPLEGFGVLVPSQEQKHGLKTLGTLFSSMMFPDRAPNNVYLYTTFVGGSRNRELAKA

SEQ ID NO: 40 - protein, 505 aa, Oryza
MAASDDPRGGRSVAVVGAGVSGLAAAYRLRKRGVQVTVFEAADRAGGKIRTNSEGGFIWDEGANTMTESELEASRLIDDLGLQGKQQYPNSQHKRYIVKDGAPTLIPSDPIALMKSTVLSTKSKLKLFLEPFLYEKSSRRTSGKVSDEHLSESMFSDQREYICSVIFLCICRDNQVVDYLIDPFVAGTSGGDPESLSIRHAFPALWNLENKYGSVIAGAILSKLSTKGDSVKTGGASPGKGRNKRVSFSFHGGMQSLIDALHNEVGDGNVKLGTEVLSLACCCDGVSSSGGWSISVDSKDAKGKDLRKNQSFDAVIMTAPLSNVQRMKFTKGGVPFVLDFLPKVDYLPLSLMVTAFKKEDVKKPLEGFGALIPYKEQQKHGLKTLGTLFSSMMFPDRAPNDQYLYTSFIGGSHNRDLAGAPTAILKQLVTSDLRKLLGVEGQPTFVKHVHWRNAFPLYGQNYDLVLEAIAKMENNLPGFFYAGKSMKAPLLYKRNLRYLKHIPVD

SEQ ID NO: 41 - protein, 505 aa, Oryza
MAASDDPRGGRSVAVVGAGVSGLAAAYRLRKRGVQVTVFEAADRAGGKIRTNSEGGFIWDEGANTMTESELEASRLIDDLGLQGKQQYPNSQHKRYIVKDGAPTLIPSDPIALMKSTVLSTKSKLKLFLEPFLYEKSSRRTSGKVSDEHLSESMFSDQREYICSVIFLCICRDNQVVDYLIDPFVAGTSGGDPESLSIRHAFPALWNLENKYGSVIAGAILSKLSTKGDSVKTGGASPGKGRDKRVSFSFHGGMQSLIDALHNEVGDGNVKLGTEVLSLACCCDGVSSSGGWSISVDSKDAKGKDLRKNQSFDAVIMTAPLSNVQRMKFTKGGVPFVLDFLPKVDYLPLSLMVTAFKKEDVKKPLEGFGALIPYKEQQKHGLKTLGTLFSSMMFPDRAPNDQYLYTSFIGGSHNRDLAGAPTAILKQLVTSDLRKLLGVEGQPTFVKHVHWRNAFPLYGQNYDLVLEAIAKMENNLPGFFYAGKSMKAPLLYKRNLRYLKHIPVD

SEQ ID NO: 42 - protein, 405 aa, Eutrema
MAPDAVADHDKKFEALSGKRVAVVGAGVRLKSRGLNVTVFEADGRAGGKLRSVMHKGLIWDEGANTMTEAEPEVGSLLDDLGLREKQQFPISQKKRYIVRNGLPVMIPTNPIALVTSSVLSTHSKFQILLEPFLWKKNDSSSKVSDASTVESVSGFFQRHFGQEVVDYLIDPFVGGTSAADPDSLSMKHTFPDLWNIEKSFGSIIVGAIRTKFAAKGGKSGETRTSPGTKKGSRGSFSFKGGMQILPDMLCKDLSHDELNLDSKVLSLSYNSGSRQENWSLSCVSHNETLRQNLHYDAVVMTAPLCNVKEMKVVKGGQPFQLNFIPEIKYMPLSVIITTFTKEKVKRPLEGFGVLIPSKEEKHGFKTLGTLFSSMMFPDRCPSDLHLYTTFVGGSRNQELAKAST

SEQ ID NO: 43 - protein, 520 aa, Selaginella
MAMAEGETAPVLGSVAVVGAGASGLAAAYRLRAAGVSVTVYEAENSIGGKLKSVSENGFIWEKGPNTMTENDPSISRMFDDLHLRDKQQFPVEQKKRYIVRNASPTMLPSNPLGFITTGLFSAQAKLKLLTEPFSWKRTKAESNEDESVGAFMERHFGDEIVDYAVDPFVAGTSGSDPSSISIRHSFPELWSLEKNYGSLFVGAIKSGFSKKKKQKLRPVEFEDEDSDFPARTRPRRGGSFSFVGGMQTLANELVSRIGKEKFKLNTFVTGLACNQQGNPSRQSWTVTGLETSGKRSKRSDKTFDAVIMTAPVDDVRAMKVVKDGKPYALDYLPTVIYEPMSVLITMFNKDSVKRALPGFGVLVPSKEQQANGFQTLGTLFSSFMFPDRAPEDQLLFTTFIGGSRNTLLASRSKEELLDITLKDLSRLIGVEGQPTAIRHVYWEKAFPRYSIGYDNVLHSIQKLESDLPGLFYAGNHRGGLAVGKTIVSGLDAAEQVLQYLQGSGGKKVFTMASLEQPVS

SEQ ID NO: 44 - protein, 514 aa, Selaginella
MAMAEGETVPVLGSVAVVGAGASGLAAAYRLRAAGVSVTVYEAENSIGGKLKSVSENGFIWEKGPNTMTENDPSISRMFDDLHLRDKQQFPVEQKKRYIVRNASPTMLPSNPLGFITTGLFSAQAKLKLLTEPFSWKRTKAESNEDESVGAFMERHFGDEIVDYAVDPFVAGTSGSDPSSISIRHSFPELWSLEKNYGSLFVGAIKSGFSKKKKQKLRPVEFEDEDSDFPARTRPRRGGSFSFVGGMQTLANELVSRIGKEKFKLNTFVTGLACNQQGNPSRQSWTVTGLETSGKRSKRSDKTFDAVIMTAPVDDVRTMKVVKDGKPYALDYLPTVIYEPMSVLITMFNKDSVKRALPGFGVLVPSKEQQANGFQTLGTLFSSFMFPDRAPEDQLLFTTFIGGSRNTLLASRSKEELLDVTLKDLSRLIGVEGQPTAMRHVYWEKAFPRYSIGYDNVLNSIQKLESDLPGLFYAGNHRGGLAVGKTIVSGLDAAEQVLQYLQGSGGKKVFTMAS

SEQ ID NO: 45 - protein, 230 aa, Amaranthus
MVIQSITHLSPNLALPSPLSVSTKNYPVAVMGNISEREEPTSAKRVAVVGAGVSGLAAAYKLKSHGLSVTLFEADSRAGGKLKTVKKDGFIWDEGANTMTESEAEVSSLIDDLGLREKQQLPISQNKRYIARDGLPVLLPSNPAALLTSNILSAKSKLQIMLEPFLWRKHNATELSDEHVQESVGEFFERHFGKEFVDYVIDPFVAGTCGGDPQSLSMHHTFPEVWNIEK

SEQ ID NO: 46 - protein, 229 aa, Amaranthus
MVIQSITHLSPNLALPSPLSVSTKNYPVAVMGNISEREEPTSAKRVAVVGAGVSGLAAAYKLKSHGLSVTLFEADSRAGGKLKTVKKDGFIWDEGANTMTESEAEVSSLIDDLGLREKQQLPISQNKRYIARDGLPVLLPSNPAALLTSNILSAKSKLQIMLEPFLWRKHNATELSDEHVQESVGEFFERHFGKEFVDYVIDPFVAGTCGDPQSLSMHHTFPEVWNIEK

SEQ ID NO: 47 - protein, 396 aa, Zea
MKSSVLSTKSKIALFFEPFLYKKANTRNSGKVSEEHLSESVGSFCERHFGREVVDYFVDPFVAGTSAGDPESLSIRHAFPALWNLERKYGSVIVGAILSKLAAKGDPVKTRHDSSGKRRNRRVSFSFHGGMQSLINALHNEVGDDNVKLGTEVLSLACTFDGVPALGRWSISVDSKDSGDKDLASNQTFDAVIMTAPLSNVRRMKFTKGGAPVVLDFLPKMDYLPLSLMVTAFKKDDVKKPLEGFGVLIPYKEQQKHGLKTLGTLFSSMMFPDRAPDDQYLYTTFVGGSHNRDLAGAPTSILKQLVTSDLKKLLGVEGQPTFVKHVYWGNAFPLYGHDYSSVLEAIEKMEKNLPGFFYAGNNKDGLAVGSVIASGSKAADLAISYLESHTKHNNSH

SEQ ID NO: 48 - protein, 414 aa, Aegilops
MTESALEASRLIDDLGLEDRLQYPNSQHKRYTVKDGAPALFKLFLEPFLYEKSSTRNSKKVSDEHLRESVGSFFERHFGREVVDYLIDPFVAGTSAGDPESLSIRHAFPGLWNLEKKYGSLIVGAILSKLTAKGDSSKKGGASSGKGRSKRASFSFHGGMQTLVDALHKEVGDSNVKLGTQVLSLACNCDELSASDGWSIFVDSKDASSKELAKNQSFDAVIMTAPLSNVQRMRFTKGGAPFVLDFLPKVDYLPLSLMVTAFKKEDVKRPLEGFGVLIPFKEQQKHGLKTLGTLFSSMMFPDRAPNDQYLFTTFIGGSHNRDLAGAPTAILKQFVTSDLTKLLGVVGQPTFVKHIHWRNAFPLYGHDYDSALEAIGKMERNNKDGLAVGNVIASGSNTADLVISYLESGIKQVS

SEQ ID NO: 49 - protein, 304 aa, Genlisea
GFPAKNVAVIGAGVSGLSAAYKLKLNGLNVTVFEADGRAGGKIRTSSQDSLIWDEGANTMTESEEEVGFLLDNLGLREKQQFPLSQQKRYVVKNGKPALLPSNPFALIASNILSSSSKLQIFLEPFLWKQRNSEETQAEESVGGFFQRHFGKEVVDYLVDPFVAGTSGGDPESLSMRHAFPDLWNLEKRFGSVMSGAVLSKLSAGRGASEKNKGSSTNERRKRKSFSFIGGMQTLTDALSNEIGENELKLRSKVLGLSSNNVKSSKVDSWSISYASSDGKSVSLDTGFDAVIMTAPLSDVKQMK

SEQ ID NO: 50 - protein, 265 aa, Amborella
MSSKGEEKGKHEATRRKPKHQRGSFSFQGGLQTLTDKLAEELGNENVKLHSKVLSLSYGDGNGDSFSNWSVSYIKNQSDQRKLLLKQSFDAVVMTAPIRNMQEMQISKCGKPYMLDFLPNVMYLPLSIIVTTFKKENVKLPLEGFGVLVPSKEQGSGLRTLGTLFSSMMFPDRAPKDQYLYTTFVGGSRNRNLASASLDELREVVTCDLKKLLGVVGAPTFVRHVYWGDAFPLYGHNYDMVLKAIEKMEQNLPGFFYAGKFSLWC

SEQ ID NO: 51 - protein, 469 aa, Rhodothermus
MASVGIIGAGIAGLTAAYELHRRGLEVTVFEATDRIGGFIQSERIDGFLVELGPQTLQRTSGDFEELLRQVDLEDACIPARPVAANRFIVRGGQPIPLPRSPRELLRTPLLSPRARLRLLAEPFIHRAHRSTEESVAKFTRRRLGPEVLDYLVEPFVAGIFAGDPEQLSVRYAFPKLFELEQQYGSLFWGLIRDRMKQRYHPAPRRSMFSFVEGLHMLPRALAERLPAHAIVRNAEVLAIRWDEKNPWTLTFRQHGRASTRFFDIIVCAVPLHRLAQLRIHPPVDRRPLSTVEHPPIALVALGFRREQVAHPLDGFGMLVPAVERDFQILGTLFSSSLFPDRAPEGHVLLTTFVGGMRHPELALLPEDRLEALVLQDLRRLLGISGAPVFRHVWRWERSIPQYRLGYDAVLACVHDVEMSRSGLFLAGNYMEGISVIDALHTGLKAARAIIQHLREEAAGGLAKLVLGD

SEQ ID NO: 52 - protein, 461 aa, Salinibacter
MPNVGIIGAGISGLAAAYRLQEHGHSVRLLEASGHTGGVIRSESSEGFLVEHGPNSIRAGAAGLETLIDALDLHEDRVWANDAADTRYVVRDGRPTPLPRSVGSFLTTDLFSTRAKLRLLAEPFIGRAAAEEESVARFTERRLGPEVLNYAVAPFVGGVFAGRPDDLSVQHAFRRLAALEEESGSLLLGAIRRALTSDDGAPPDTPSGLFSFRNGLQTLPNALADTLGDRIRLNAPVHALAHDGTAWRVTVSPPDAPAHTRSFDALVCTVPLHRLAAMEIDTPVDLAPLGEVTYPPLSVLALGYGRDAIDHALDGFGMLVPPVEDTLDVLGTIFSSTLFPGRAPEGHVLLTTFVGGARAPHHATSDAAALQARVARDLDSLLGVDASPVFRRLVHWPHAIPQYELGYGTVKDTFDALEAAHPHLAFAGNYRAGVSVGDALTSGLEAADRLLETDERAAQPH

SEQ ID NO: 53 - protein, 461 aa, Salinibacter
MPNVGIIGAGISGLAAAYRLQEHGHSVRVLEASGHTGGVIRSESSEGFLVEHGPNSIRAGAAGLETLIDALDLHEDRVWANDAADTRYVVRDGRPTPLPRSVGSFLTTDLFSTRAKLRLLAEPFIGRAAAEDESVARFTERRLGPEVLNYAVAPFVGGVFAGRPDDLSVQHAFRRLAALEEESGSLLLGAIRRALTSDDGAPPDTPSGLFSFRNGLQTLPNALADTLGDRIRLNAPVHALTHDGTAWRVTVSPPDAPAHTRSFDALVCTVPLHRLAAMEIDTPVDLAPLGEVTYPPLSVLALGYERDAIDHALDGFGMLVPPVEDTLDVLGTIFSSTLFPGRAPEGHVLLTTFVGGARAPHHATSDAAALQARVARDLDSLLGVDASPVFRRLVHWPHAIPQYELGYGTVKDTFDALEAAHPHLAFAGNYRAGVSVGDALTSGLEAADRLLETDERATQPH

SEQ ID NO: 54 - protein, 203 aa, Zea
MTAPLSNVRRMKFTKGGAPVVLDFLPKMDYLPLSLMVTAFKKDDVKKPLEGFGVLIPYKEQQKHGLKTLGTLFSSMMFPDRAPDDQYLYTTFVGGSHNRDLAGAPTSILKQLVTSDLKKLLGVEGQPTFVKHVYWGNAFPLYGHDYSSVLEAIEKMEKNLPGFFYAGNNKDGLAVGSVIASGSKAADLAISYLESHTKHNNSH

SEQ ID NO: 55 - protein, 469 aa, Rhodothermus
MASVGIIGAGIAGLAAAYELHRRGLEVTVFEATDRIGGFIQSERIDGFLVEHGPQTLQRTSGDFEELLRQVDLEDACITARPIAANRFIVRGGRPIPLPRSPRELLRTPLLSPRARLRLLAEPFIHRAHRSTEESVAKFARRRLGPEVLDYLVEPFVAGIFAGDPEQLSVRYAFPKLFELEQQYGSLFWGLIRDRMKQRYHPAPRRSMFSFVEGLHMLPRALADRLPAHAIVRNAEVLAIRWDEKNPWTLTFRQHGRASTRFFDIIVCAVPLHRLAQLRIHPPVDRRPLSTVEHPPIALVALGFRREQVAHPLDGFGMLVPAVERDFQILGTLFSSSLFPDRAPEGHVLLTTFVGGMRHPELALLPEDRLEALVLQDLRRLLGISGAPVFRHVWRWERSIPQYRLGYDAVLACVHDVEMSRSGLFLAGNYMEGISVIDALHTGLKAARAIIQHLREEAAGGLAKLVLGD

SEQ ID NO: 56 - protein, 453 aa, Caldithrix
MTVAVIGAGISGLTTAYYLKQQGVDVQVFEKNNYIGGSVITEKKDGFLIDLGPNSTLETSQVLRQLIDQIGLQSQKVYASDVSNKRYVVRDGLLHALPLSPPAFIKTKLFSWKAKLQLLKEPFLPKVEVDDISLADYVRYRLGDEFLDYAINPFVAGVYAGDPEQLSAPAAFPKLYNLEQNYGSFIKGAIKGKRERKKRQEVAKDRAKMFSFLDGMQVFPQALARQLGEVIHLNCEVREVIPHGKGFKVVLEQDSGEQECFFERVVISVPTYVQAKILNSILKERAALLADVLHPPIAVVFMGFKRDDVAHALDGFGFLLPAKEKKQILGSIFSSTIFPQRAPQGKVAFTTFVGGMRNPDNALKDDEEIKELVLKDLNDLVGLHGQPVLTRIRRWPRAIPQYTLGYKKIQALFDELEQEFSGLFFAGNFRRGISVGDSVLSAFETSEKMLKEK

SEQ ID NO: 57 - protein, 467 aa, Opitutus
MSTSPFNPSATASGRPPKTFAVLGAGITGLTAAHRLTQLGHKVRVFEQSDRVGGSIKTEEVDGWLIEGGPNTLLSGELAVDKLIDELGLNGERIAADPAAKNRYIVRRGRALAAPMSPPSFFASSLFSPVAKFKLLAELFARRRVRTTDVSLAEFVESHFGREFVDYALNPFVGGVYAGDPEKLSARQSFPKLWEIEQTHGSLIRGQIAAAKARKARGEPRPGIFSFKHGLHVLPEALAARLPAGAITLGASLDAIVPGDKWNVVWHDDVATHTQSFDSVVVALPAPALARLQIGTLGEKPLAALALIEHPPVSSLFLGFRREQVAHPLDGFGVLVPAVEKRSVLGVLFSSSLFPGRAPLGHVALTVMVGGTRQPQLASLPADQLLAAVRPDLTQLLGVSGDPVFVRHNFWPRAIPQYNLGHEHFIAALAAGERFHPGLFMGGQARDGIAVPACIAAGEKLAERAGQ

SEQ ID NO: 58 - protein, 455 aa, Verrucomicrobia
MGNPNKTIAILGGGITGLTAAYELLKLGHKPTVFESSSRIGGAIETIRQNDFLAECGPNTLLETSPRISALISDLGLDSRKRYANPSMKNRYIIKGGKPVPMPLSPGQFVTTKLFSLGAKLNLIKEPFIAPCPSETEESLAAFVVRRLGQEFLDYAINPFVAGVYAGDPSKLSVQHAFPKLYALEQQYGSMIKGQFFGARERKKRGTVSKDKAKLVSFDQGLEVLVDGLGQKIEDTINISTVIESVEKAEEKWVVQGRKIRESFDAVITAIPTHRMTKMTFRDESDLDMSILRDIIYPPVSSVVMGFRRDQIQHSLEGFGMLVPKVERKNILGTIFSSSLFENRAPEGYVTLSTYIGGMRQPDHALLDDQEMDRLILKDLEALLGVRGEPAFINRRVWKKAIPQYTVGYGKILDRFNELEAAHSGLFFAGHYRNGISLGDSILAGLDVAQRINQQ

SEQ ID NO: 59 - protein, 462 aa, Ignavibacterium
MTKTIVVIGAGISGLTTAYLLSKRGFNIRILERKSEVGGSIESIKENGFLFDRGPNSALETTPLISQLVEELNLKDELLYANKAANKRYILRNNELHALPMSPPALIKTKLFSAKAKLRLLTEPFIGRSEDGYYQSLAEFVRRRLGQEFLDYAINPFVAGVYAGKPEELSVKSAFPKLYALEEKFGGLIIGTIRSIRERKKRAEKSKQSARMLSFKSGMISLPKAIANYFADKLILSAEVISVDKTAEGFIVSYRHSGIDEAIVCDAVLSTVPSYVAGNLFSKFDKKFKVHSDEIYYPPVLVYFLAYEKKNIGQTLDGFGFLIPEKENKSFLGALWSSVIFPYRADNNFATFTLFIGGSRYPDFVKEDRNKLLEKVRKEFEQLMKIKSDPVFSAYRFWEKAIPQYNIGYIEHERFFDEFEKQNPGLFISGNFRGGISVGDCIKNAELVANKICVQFTMHNVQ

SEQ ID NO: 60 - protein, 457 aa, Coraliomargarita
MEKKAIVIGAGISGLCAAIELKKSGFNVTVVEKRERAGGVIGTTARDGFRAESGSNTVMVNSQKTLDFLMEIGLKDKIVNSSPAAKKRFFARYGKPQAVPMGPLQLLTTRLFSFAGKLRMLCEPFIKPPSQDSDPSVADFTAERFGREVLDYAMNPFMAGIYGADPEKLSIKHAFPPFWNLAIKYGSVIKGAMKARREKMAAGNFFKPVMISFKSGMHTLTDALAAELGDSVKCGAKVISIDSNCDGWEVSWGTETEDVCENYDALVVAVPAPEISGLPFGGMLAAALAPLAKIQYAPVATYTMGFKRQDVSHPLDGFGVLTPKKENFSILGSLFVSTLFDDRAPDGYIALTNYVGGMRHPEFAALERGEMRKLVLEDLKKLLGVNGEPVFEELFVWKNAIAQYNVGYQEYLDIMDDIEKRIPNIALVGAYRGGVGVSSCLENGLLSAAKLAGRISD

SEQ ID NO: 61 - protein, 465 aa, Salisaeta
MARIGIIGAGIAGLTAAYQLQQQGHMVRVWEARGVAGGAIRSERTSDGFLVEHGPNSLRATTPIVPRLLEDLGLERARLSAAPAATKRFIVRDGTLRPLPLSPPALLTTSLLSTRAKLRLLREPFVAAGAPTADETVASFVRRRLGPEVLAYAVDPFVAGIFAGDPHRLSLKHAFGRLYEMERTHGSLLRAALHSARTGATDDASTATDRRIFSLRDGLQMLPHALADALGEAIRYEAPVTALRQMPDGTWTVATETDATQVNALISTVPLHALGSIDWAPAVDTSPLQRVPYPPVRVVALGFRRADVAHPLDGFGMLVPSAEDQFQILGTLVSSTLFPGRAPAGHVLLTTFVGGMRHPTLGAASDAAVRKVVLNDLQALLGVQGAPVFERFIAWPRAIPQYTLNHGAAVRTLEQLEDVHPGLFFAGNYRDGISVGDAMASGEDAARRVDAHLAGADRAVAATGP

SEQ ID NO: 62 - protein, 179 aa, Ambrosia
MASPTIVDNQKPAKRVAIVGAGVSGCAAAYKLKLHGLNVTVFEADERVGGKPRSVSQDGLIWDEGANTMTESEADASSLIDELGLRDKQQFPISQHKRYIVRNGKPVLIPSNPIALIRSSFLSTQSKVQILLEPFLWKKTKSSDEPESVGGFFQRHFGKEVVEYLIDPVVAGTSGGDPK

SEQ ID NO: 63 - protein, 451 aa, Melioribacter
MSKKIVVLGAGISGLSTAYWLVKKGYDVTILETKNEPGGSMISRRLDNFLIDYGPNSGLETTPLIRKLVEEVNLSDKMIYANAAASKRYILKNGELIPLPMSPGSFIRTKLFSSGAKFRLMAEPFVSKSDDGYYQSIAEFVRRRLGNEFLDYAIDPFVSGVFAGDPEKLSVKSAFPKLYRLEEVYGGLIKGMIKGARERKQRNEESKQSAKMFSFLEGMQSLPNAIADKLKDNIVFSAKVLNVTGANDKQWKVTYELNGNRESITADTVISTLPAYIAAGVFGELDQKLAERLNSIYYPPVMVLYLGYNKKDIKRKLDGFGFLIPSKEKKHFLGAIWSSSIFPGRSPEDMAAFTLFVGGARSPQLFEMEKSDLIKKVLSEFHQIMNIKGEPVLIENKLWQKAIPQYNLGYIEHEKYFEVFEENHRGIYLRGNYRGGISVGDCIKNSELEIK

SEQ ID NO: 64 - protein, 472 aa, Halothiobacillus
MNTHSNASEPINCPYLVIGGGISGLATAYHLSRMGKTVTVLEATSRVGGAVGSIEEDGWLRELGPNSLVQTPEMAALMSALDLVSEIIEANTVAKKRFVAKNGHPVALPGSPLELLTSPLFSMGDLWHLAREAWIKPVNKEETIAEFVRRRLGQGFLDWAVDPFVSGVYAGDPNRLSVQAAIPKIYAFEQESGSLIRGGIAKMKAAKANPAPVTLPAKGKLFSFKRGLQTLTDALATAITSSGRGNIQLDSAITNIQRLPEGGWSVKTVQGKTFHTRQLILSTPAHVSAQLLGEVDGPLAETLAAIEYPPVTSVVMGFDRSEVAHPLDGFGLLLPSKEKKRTLGVLFSSTLFPDRTPAGKVLLSAFIGGRKHPEAAQGDDQELLDRVLGDLSPLLGIKGKPEFLRVKRWQQAIPQYEIGYLELQEKISQRLTALPGLSLNGNWRGGIAVGDCLNNGNKLAERLIENTRTEES

SEQ ID NO: 65 - protein, 480 aa, Chondrus
MPEPVKRNVAVLGGGPAGLSAAFRLLHDLPPGLSVKVDLYEATGRLGGAVTSACDAGFCYELGPNSMNAKHPSVADLIQEKLRLKPRMLPRSPYAKRYYFMRDGKLVPLPLSPLHFATTGLLSWRAKWHVVKEPFVARLQDVRDSHMESVASFFQRRFGREVVDYLVDPMVAGTYSGKPADLSMKHALRKVWRLEQKHGSVIGALLRGAGKTKPDPRYKPYTGKELRASFTYDKGMEVVTDALVANINDLNPRGGRLYTHGKVRTLDRDPNGAWRINGRGKYDAVISTIPTHAVKSIYTNMSALGKGFKKLNKSIKYAPVSVVVMGFDKSQVPHPLDGFGALIPTVEGRQILGINFSSSNYPQRLSDPDKVFLTVYVGGQRNPDLPFRRAKEIVDISKKELGHVLGVKGDPFFSRVKTWKRGIPQYDPQFDESLCTMARAEKSAKGFVFGGNYRDGVGLPDALRSGILSAEKTLQYLKTL

SEQ ID NO: 66 - protein, 463 aa, Rubritalea
MRKHIAIIGAGVSGLSTAYHLQQAGHSVVVFESSKRAGGVIQTIREDDYLCEWGPNSLMIGDKRIEALLKSIGLDDEILEANTASKKRFIIDRDRLQALPNGPFQLLGSPIFSLKAKLRLLKEPWVKRHPANSKETLADFMERRLGPEPVAKLVNPFISGIYAGDPKRLAVEHAFPKLFQLEQDYGSLIWGMIRSKKDQKNSFKSKHKLQKRRIVSFKQGMEALPQAMAAALDEGTLIFEAKIGGISQNRNNKRWHMDWKCPNGTIGQGSFDAVILTQASHHLNDIPLDEEVLESLSKLPSIDHAPVTSMLLGFKREQIKHPLDGFGMLSTFEQKSKMLGALFTSSLFPGRAPEGHVAINVMIGGVRRPELCELPEPTLRANILDELRRLLGVDGKPSFCHIHHTSKAIPQLHTDYGIVAQQIIDCEREHPGLYLAGSYRNGIALPDRLLEGISLTEKINQSL

SEQ ID NO: 67 - protein, 457 aa, Acidobacteria <phylum>
MGVEVAIIGAGISGLSVAFFLKRAGAGVLVLEAEEDVGGTMRSRRFKGYLIELGPNSALETTPLFQELIAAAGLAGERVYASEAARNRYIVRGGELHPLPLTPLAFLRSRLWSWKGKLRVLAEPFHGRADREESVADFARRRVGQEFLDYAVNPFVAGIYAGDPERLSVRFAFPRLYALEAQYGGLFLGMLRGARERRRRGEAPKIAARLFSFREGMGALPRALAAALGNTVWCATRALCVERAGAAFEIAFERDGRRDTLRAERVVLATPAYAAASLLKRLAPEAARALDRIVYPPVSAVILGYPETAIGRPLDGFGFLVPEKEQRRILGTIWNSTIFPARAPQGFVTLTTFVGGMRQPELARRPNEELIALVAEELTDLLRLRGEPEFAYVSRWERAIPQYELGYGEILDALDRAEREHVGLYFCANYRGGIAVGDCVMSAHATAERILRDRARS

SEQ ID NO: 68 - protein, 441 aa, Coraliomargarita
MPDTCIIGAGITGLATAWQYQRKGKDCVVLESGPQVGGAIQSILQDGYLAEEGPNSIQLNSLEIEDFLTSIPGLEAQIIEANPAAQKRYIVRKGRLRAVPMNPLQAITTQLWSIAGKLRVLREPFIKAAPPEPDQSVADFVTRRLGKELYDYAINPLVGGIYAGKPEMLSLRYGFPKLYALEQEHGGLIRGALAKMKAAKANKGPKAKKYILSFKDGLQTLPQSIANNLNEPVQTGVSIESIRQIEDMWAVRWNGQVKAFKELIVTVPAHKLPGLPFEEPIRLPAIDYPPVSVISLGYPLSAIKQPLDGFGALVPEREDRNILGVLFPSAVFDGRAPEGHGLLTVFVGGSRSPECSSPDTDQLLKTIQPDLETLLGIQDEPSFVHHKHWPMAIPQYTLGYEKVLEAITRIEQQYIGLKLAGNYRTGISLSYCLESAIASTN

SEQ ID NO: 69 - protein, 474 aa, Oscillochloris
MNSYDVVVVGAGISGLSAAYTLFKRGLDVLVVEAGAEVGGVMRSIVTPEGYVLDCGPNTLASKDPRMWAEFDDLGMRDRLVVAGRAGKRRYFLKDGQPLEIPNDPIGLLRMEHVSMQAKLRVLREPFIPRATSPDESVASFFSRRIGPEVMERMIDPFVSGVYSGDPSKMSIKATFPSLWEAEQRGGSIIKGFLTAGKAKKAAGEKKAKPIGPKMRSVTFNFKGGVAEWPKTIAKVLGDQRVWKNARVTTLYPESTGWTLVVERDGQVETIEAASVIMAAPAYAAADLIAELDPAAAKGLRGIRYSSMAVVNLGYRENQVTRPVNGFGVLAPSCERRNFLGILSASTLFPPFAPAGRVLTINLMGGEINPIRPEQSDDELIARAIADNQAVIGANGAPEVVNLTRWPRAVAQYNFGHTEAMAALENLERTRPGIYFVGSYRGGVGMPKCWRNGVNMAERVATYLKTRSAVASLR

SEQ ID NO: 70 - protein, 474 aa, Opitutaceae
MPVAVIGGGITGLTAAWRLAREGHPVRLFEASPRPGGLIRSERDGEWLSEAGPNSLLDNKPELAALLAELGLEDARQYAQPAAKKRFIVRRGRPLAAPSSPVSAVTTPLLSLRGKLRIFGDLFWRPRPRAEDLPLGEFAAAHFGRELADYAVDPFVSGIYAGDPQRLSARYAFPLLWELEQKHGSLIRGGIAAAKARRATRPAGPAEKPRPPRARIFSFAEGLETIPAALAERLPAGCVETGARVVRLVPPVARGGAWEVVWERKDEKDEKGASGVEGRLTERVAAVILALPGEALARLEIGANGEHPLAALAEVEYPPVASLFIGYRREQARHPLDGFGMLAPSKENRNLLGVLFSSTLFPGRAPAGHIALTVLAGGVRRPELARMELPSLMGIVRAELLELLGVSGDPVYVKHRVTPHAIPQYNLGYGRFHTVIETAETAHPGLLVGGPVRDGIAVSACVAAGEKLARRVVA

SEQ ID NO: 71 - protein, 239 aa, Amborella
STKSVAVVGGGVSGLTTAYRLKSHGLNVTLYESEGTAGGRIRSIAYGGLIWEEGANTMTESEMEVKRLIDDLGLREKQQFPISQNKRFIARNGTPVLIPSNPLALFGSKLLSPHSKLRVILEPLFWRSSNRKGDISKVSDQNLQESVGDFFQRHFGQEVVDYLVDPFVAGTSAADPNSLSVQVTSMSEICQNYLQYLGWSQGPSSQLMTLTLSPSSVIDQMLSERMVTFLQVMLSPLLM

SEQ ID NO: 72 - protein, 490 aa, Opitutaceae
MSASLPPPPPPPHTHTQARLPVAVIGGGITGLTAAWRLAREGHPVRLFEASPRPGGLIRSERDGEWLSEAGPNSLLDNKPELAALLAELGLEEARQYAQPAAKKRFIVRRGRPLAAPSSPVSAVTTPLLSLRGKLRIFGDLFWRPRPRAEDLPLGEFAAAHFGRELADYAVDPFVSGIYAGDPQRLSARYAFPLLWELEQKHGSLIRGGIAAAKARRATRPAGPAEKPRPPRARIFSFAEGLETIPAALAERLPAGCVETGARVVRLVPPVARGGAWEVVWERKDEKGASGVEGRLTERVAAVILALPGEALARLEIGANGEHPLAALAEVEYPPVASLFLGYRREQVRHPLDGFGMLAPSKENRNLLGVLFSSTLFPGRAPAGHIALTVLAGGVQRPELARMELPSLMGIVRAELLELLGVSGDPVYVKHRVTPHAIPQYNLGYGRFHTVIEAAETAHPGLLVGGPVRDGIAVSACVAAGEKLARRVVA

SEQ ID NO: 73 - protein, 474 aa, Chloroflexus
MMAGYDSVVIGGGIAGLAAAYTLHKRGYRVLVIESTNRVGGVIQTITTPEGYILDCGPNTVGTGDARLWQELIDLGLRERITPAAPCSKRRFILINGTPVEIPTSPVGLITTRLLSWRGKLRVLAEPFINRGSTDPDESVAAFFTRRIGAEATAHLLDPFVAGVYAGDPQRLSTAAVFPSLWEAAQRSGSIVRGMLSKPKPKTQVSEPKMRSRTFTFRGGLAEWPRALAQALGAGNVWTERRVVKLQPRDSWWEVTIDGVNGPETLISRSLIIATPAFTAADLIESVDQRAAGALRGIPYAPVAVVHLGFRRDQISQELSGFGVLAPSSEQRQFLGILWTSSIFPHVAPHDHVLTTTLSGGAIRPELAERSDETLIEAAIRDHHQLLGIRGQPIFTHVTRWRTAIAQYTFGHRERIATLVQLEQRLPTIQFAGSYRDGVGVPKTWASGVQAGERIAAALAAHGTTAVSTETASG

SEQ ID NO: 74 - protein, 462 aa, Leptospirillum
MAGFDCDTLVVGGGVSGLAAALTLKNRGVDVRLLESRGYLGGAIRTVREDGYLLEFGPNSLMVRPEDAIDTVLGDPELRARIVPASGLSKNRYVVKAGHLYPVPLSPWAFFRTPLLSWRGRRDILSEWKVPPRTGGPEETLSHFVRRRLGEEALDYFVDPFVKGVYASHPDLLSVEAAFPLLVRLEREHGGLLRGALKTFLKRRKRPSGSSPRGIFSFAGGMTDLVEAMGKRLGEDVGTNVDVIKYTRLEEGFRVALMYDETEYYMTSRRLILATSAPQAAELLEGDPDGPSSELKSIPYAPVTIAYAGFLREQVTHPLDGFGLLCPTVENRKVLGVIFSSSLFPGRAPEGKVLLTVFVGGMTGQKLAQAFDEDLERIVLKELTELLGVKGAPSFFRIHRWEKAIPQLILGHGETVRTIRKKLPSGLRLAGNYLDGISIARAFASGVRAAEELLSEDGGTPG

SEQ ID NO: 75 - protein, 462 aa, Leptospirillum
MAGFDCDTLVVGGGVSGLAAALTLKNRGVDVRLLESRGYLGGAIRTVREDGYLLEFGPNSLMVRPEDAIDTVLGDPELRARIVPASGLSKNRYVVKAGHLYPVPLSPWAFFRTPLLSWRGRRDILSEWKVPPRTGGPEETLSHFVRRRLGEEALDYFVDPFVKGVYASHPDLLSVEAAFPLLVRLEREHGGLLRGALKTFLKRRKRPSGSSPRGIFSFAGGMTDLVEAMGKRLGEDVGTNVDVIKYTRLEEGFRVALMYDETEYYMTSRRLILATSAPQAAELLEGDPDGPSSELKSIPYAPVTIAYAGFLREQVTHPLDGFGLLCPTVENRKVLGVIFSSSLFPGRAPEGKVLLTVFVGGMTGQKLAQAFDEDLERIVLKELTELLGVKGAPSFFRIHRWEKAIPQLILGHRETVRTIRKKLPSGLRLAGNYLDGISIARAFASGVRAAEELLSEDGGTPG

SEQ ID NO: 76 - protein, 446 aa, Verrucomicrobia
MNTKKVCILGAGLSGISLGLSHENKGNQVTIFEKDLRVGGVLQSIKSEGFLMDYGANTLSIRTKKTVDFLKQYEILEHAMDANQESSKRFIIRKNRIISLPQGPLSFLCSSFLSPVGKLRLCLEPFIGRKKDNGSDETMAEFVERRLGREVLDYGVNPFIGGVYAARPESLILKYAFPSLHDTELTFGSIFWGMIRGGAQPSEKISKSRLISFREGMQELPNRLAARMHNPPVLGCEIKKIEFKDDVQWCVQGEKHDGKIQKEVFDQIICTLPSHALDKIEWVGINSSHLLETLTRAYHPPLALVFQGYQQRQIKHPLDGFGFLVPEKERRKILGTLFSSTLFQNRAPENSVLLTTYIGGERNPELCDLPQNEILGHAFRENQDLLGIEGKPIFEHLKLWPKSIPIPDHTLEDRKKAASTLTLENKGLQILGAHINGAPLPNCMVL

SEQ ID NO: 77 - protein, 475 aa, Chloroflexus
MMMANYDSVVIGGGIGGLAAAYTLYKRGYRVLVIEAANRVGGVIHSITTPEGFTLDCGPNTIGTNDVRLWQELIDLGLRDRIRPAARCGRRRYILINGTPIEIPSSPVGLITTRLLSWRGKLRVLGEPFVNIGTPTGEESVAAFFSRRIGHEAVAHLLDPFVAGVYAGDPNQLSAAAVFPSLWEAVQRGGSIVRGMLRRPKQKTLISEPKMRSRTFSFQGGLADWPRAIARALGTGNVWTGRRAVGLRDLGTYWEVTVDGTGRLETITTRSVIIATPAYVAAELVEALDPAAASALRSIPYAPVSVVHLGFRRDQLSHELNGFGVLAPSSERRQFLGILWASSLFPHVAPPDRVLTITLSGGAIRPEVAEQSEEALIESAIRDNQEVLGIRGQPLLTHVTRWHHAIAQYTLGHRERIATLERLEQRRPTLQLTGSYRGGIGIPKTWASGVGAGERIAAALDAQGTTADTLEQARG

SEQ ID NO: 78 - protein, 456 aa, Desulfurobacterium
MKVAVIGAGISGLSVAFYLKKGGAEVKVFEKEKTVGGKMKTIHEDGYIIETGPNGFLDGKPYTLNLVKELGIESKLYRSSDKARKRFIYTNGRLVRLPESPIAFLASYLLSWKGKLRLVGEFLVPPKKEDIDESLSEFAKRRIGEEALEKLLDPMVAGIFAGDPDRLSLKAAFPAIYYLEKQYGGLIKGLIAKMKEAKKSGKKSGPAGPGGVLTSFKGGVKDLIDSLSEFLGDSIETEVEILGLDRIEKGWKVKYKKENEVFEETFDAIVFSTPAYITAKLLNDLNLELSKLLSEIEYSPISVVALGFEKKGLGHDLDGFGFLVPRSEKRKILGALWDSSVFPNRAPSGKALIRVMIGGARQPELALLPDEELVNIALKELRRIMKIRHYPEKIKVFKHEKGIPHYTVGHAERVEKIFRLISKYPGLYLCNNAYTGVGVNDCTKAAEEVARRILDG

SEQ ID NO: 79 - protein, 455 aa, Desulfurobacterium
MKKVAVVGAGVSGLSTAFYIEKFGGDNVSVTIFEKENVPGGKMLTVQKDGFIIETGPNGFLDNKPYTLDLVKDLKIEDRLYRSSDKARKRFVFVNGKLVRLPENPIAFLSSYVMSFKGKLRLAAEYFIPPKKDDSDESLSSFVKRRIGKEALEKLIDPMAAGIFAGDPDKLSVKAAFPAVWHLEKKYGGLIKGLLAMKKEKKDATAGPGGVLTSFKGGVKDLIDALVANIKGEIHPGTTVKKLIPENGKWKIVYEKDDEIFEESFDKVVLSTPSYVAAALVKNFDEKLAEKLYEIEYSPIAVIAFGFIKKGLGHHLDGFGFLVPRSEGRKILGVLWDSSVFPNRAPEGKALIRAMVGGARQPHLALAGEEEIARMTYKDIKRIMKIRHRPIMTAVFKHPKGIPHYTVGHVEKVNEIFKLASNHGGLFLNSNAYRGVGVNDCVYNSLKTAEMVTSE

SEQ ID NO: 80 - protein, 484 aa, Arthrospira
MTNLVDSLIVGAGISGLSLAYSLNREKSVREPLKVLVTESQNRVGGNITTGRADDFLWEEGPNSFAPTPELLGLAVDLGLKEELIFADRKLPRYVYWNLMLHPVPMNPPALLSSELISARGKLRAALGAIGFVPPPVGAHLSQQGGEETITQFFDRHLGSEVLERLVQPFVSGVYAGDPQQLAVRSAFSRIVAAEEAGGGLLPGFVRSRLNKKAPVSTPDPNIPKTRPGELGSFRYGLQTLPETLASKLGDRVKLNWTIDRFYPTDHQTYIAEFSTPDGPQQVEARTLALMTPAHVSARLLQPLHSPIATALSQIPYPPVACVVLAYPKSALKQQLKGFGNLIPRHQGIRTLGTIWTSSLFPGRAPESWQVLSNYIGGATDPEIGEMDDDQIVAAVHQDLRQILLAEDVPPKVLAVHLWRRAIPQYTLGHQNRLNCIDAGLRSLPGLYLCSNYIDGVSVGDCVRRGQQWASKIQSHLHDCQTAN

SEQ ID NO: 81 - protein, 462 aa, Leptospirillum
MAGFDCDTLVVGGGISGLAAALTLKNRGVDVRLLESRGYLGGAVRTVREEGYLLEFGPNSLMVRPDDAIDAVLGDPELRARIVAASGLSKNRYVVKSGNLYPVPLSPWAFIRTPLLSWRGRRDILSEWKVPPRTGGPEETLSHFVRRRLGEEALDYFVDPFVKGVYASHPDLLSVEAAFPLLVRLEREHGGLLRGALKTFLKRRKRPSGSAPRGIFSFTGGMGDLVEAMGKRLGEDVGTNVDVIKYTRLEEGFRVALMYDETEYYMTSRRLILATSAPQAAELLEGDPEGPSGELKAIPYAPVTIAYAGFLREQITHPLDGFGLLCPTAENRKVLGVIFSSSLFPGRAPDGKVLLTVFVGGMTGQKLAQTFDEDLERIVLRELTELLGVKGAPAFFRIHRWEKAIPQFILGHGETVRTIRKKLPSGLRLAGNYLDGISIARAFGSGVRAAEELLSEDGGTPG

SEQ ID NO: 82 - protein, 458 aa, Verrucomicrobiae
MQDAIILGGGISGLTAGYLAQKQGQDISVIEKGKIPGGPISSFREEGYLVERGPNSLLLPDPWVETFIEELGLRDQLQETNPIASKRYIVKNGRPEAVPSSPLQAVFTPLFSLRGKFGFLLEPFRKKISDRAGSRETVASFVKRRMGLDFLDYAIDPFVSGVYAGDPNRLILEHAFPLMRGFERDSGSIIRGAIKHKKKQKREGTAYKKRSISFKDGLGILPQTIARKLGNRLWLGSEVVAVNRVEDHWQVTWKREGENFEGFAKNLLVCLPSHAIKRIAWSERIAAPLRSSPNLEYPAVHSLALGFRREQIAHALDGFGVLVPSKEPPTILGALFSSSLYEGRAPDGHCLLTVMLGGIRHPELAALPQDRLLELALRDLRALLGLKGDPSFYRCTSWPRAIPQYTRDFGPWRDTLKSLAEEFPGLHFGGNSVDGIAMGASILSGKRLAECLDKDIDV

SEQ ID NO: 83 - protein, 446 aa, Verrucomicrobia
MNTKKVCILGAGLSGISLGLSHENKGNQVTIFEKDLRVGGVLQSIKSEGFLMDYGGNTLSIRTKKTVDFLKQYEILEHAMDANQESSKRFIIRKNRIISLPQGPLSFLFSSFLSPVGKLRLCLEPFIGRKKDNGSDETMAEFVERRLGREVLDYGVNPFIGGVYAARPESLILKYAFPSLHDTELTFGSIFWGMIRGGTQPSEKISKSRLISFREGMQELPNRLATRMHNPPVLGCEIKKIEFKDDVQWCVQGETRDGKIQKEVFDQVICTLPSHALDKIEWVGINSSHLLETLTRAYHPPLALAFQGYQQRQIKHPLDGFGFLVPEKERRKILGTLFSSTLFQNRAPENSVLLTTFIGGERNPELCDLPQNEILGHAFRENQDLLGIEGNPIFEHLKLWPKSIPIPDHTLEDRKKAASTLTLENKGLQILGAHINGAPLPNCMVL

SEQ ID NO: 84 - protein, 485 aa, Synechococcus
MNPATPEPLNAEVVVIGAGISGLTLAWRLQQGLSARGGSPQAVLLAEASSRVGGCISTQSKDGYRWEEGPNSFTPTPALLNLIAEVGLTDQLVLADAKLPRYIYWEGALLPVPLSPAAALGSRLLSVGGKLRALQGLLGFVPPPPGHEETVRQFFRRQLGSEVAERLVEPFTSGVYAGDPDQLSAVAAFPRVAGLEERYGSLFAGALQALRQRPQPSPAAIQPPPKRGQLGNLRQGLQQLPEALAQKLGDSLRLGWRALQLKRAGELYWVGFETPEGSRWVAARQVVLALPAYEAAALLQELNPPASQLLAEILYPPVAVVALAYPQEALPQPLRGFGHLIPRSQGLRTLGTIWASCLFPERAPQGYHSFLSFLGGATDAALARRRGIPPIPALSPEERAQIAHAELSQVLLTRRAEPVYLGERLWPRAIPQYTLGHRQRIAQVQAHLASQTPGIWVCANYLDGVALGDCVRRAEALAQQLLSQV

SEQ ID NO: 85 - protein, 443 aa, Hymenobacter
MTIAILGGGISGLVVAWQLQKAGVAYDLFEAETTPGGCLRSVSHPDGYLVETGPNSLQLSDELLELITELGLVDEIQDAAAVSKNRYVLRNGRYQQLPSTPPALLTNGFFSWKAKFNILRELRRPAAPLNPTETVDAFFRRRFGPEIVDYAVNPFISGIYAGDPAQLLIHKTFSKVAALEQQYGSVLRGLAKTGGGAGRRRIISLQGGIQKLTDTLAAKLTHHHVRQRVLALHRTTKGGYQVQTSAGSNGGFSYDAVVLALPTFAAAPLLAPLFPEAAAALAAVHYPPMAAVYTAYRREDVGHPLDGFGALHPKVEQPYAAGSIWTSSIFPNRVPDGQVLFTTFVGGAQYEANAQQSETAQKAAVHEELSRFYDIKAAQPLWQYRYLWDKAIPQYDQRIMAAHTTTDALQAQGIWSAANWRGGVGVPDCIRHARHVADQLTGK

SEQ ID NO: 86 - protein, 448 aa, Pontibacter
MRVAIIGAGISGLSLAYYLQRQGVAYDLFEAGSEVGGNMRTLRKNGYTFELGPNTLQMNEELLQLITELKLETELLPLTPRNNKRYVLHDGKLYPVPASPKSFLANDLFSNEEKHRILQERKQPPAEVENETVSDFFERRFGVKQMDYLAAPMISGLYGGDPRQLLVNKAHPELKELETQYGSVLEGMVQKKKRGVFQRAFSFRNGMSTLPHAIADKLISLHLDHKVEFITRIKGKFIISCASNGDHDNEEYDKLVLALPAHQAAELIEFTYPGMSAALQNINYPPMAVVHTVYNRAEVGHPLQGFGALHPWEEQSFTSGSIWTSSLFEGRCRSHEVLITSYVGGTRFAEHAQLEERSLLEQVHQELCQTYQIKALAPVYQHLHLWQHALPQFDLYIEDAHHMAEVLEQDGLFISANWYAGVSVPDCVREAKAIAAKINTRAASRSIA

SEQ ID NO: 87 - protein, 463 aa, Leptospirillum
MATEDVETLVIGGGIAGLACASHLKLAGRTVRLVERNDYLGGVIRTLSDSGYRIETGPNSLLVRTEEPLLKYLSRPEIAARIQLAGRMGKKRFILKDGHPVALPMSLSEGIFTQILSLPAKVRLLKEPFIPPAGGVDGVDPEKETVADFVRRRLGNEFLESLIDPFVKGVYASDPHLLSMADTFPRLVQMEKSYGSLIKGGLALARQKKAPAPAFAREILSFSEGMGTLPESLANILDDDAGTNAEVIGCAPSESGFRTALLFEEETYYIRSKHLVLALPAAQTAELIEPMAPGIPSLLGQIPYAPIAVVYLGYPRDRISHPLDGFGLLVPSRERRKILGALFSSSLFPGRSPDGHVLLTVFVGGMTQPKLAQAFDEDLLPMVTKEIGSMLGVLGAPSYVRIQRWAGAIPQSVPGHGERIRSIESALPSGLHLAGSYLSGVSVSQTFSSGIRAAEKILAQSPG

SEQ ID NO: 88 - protein, 451 aa, Prevotella
MERQRKIIVIGAGLTGLTCAAHLRHKGQDVEVLEATERIGGLMQTEDFDGFIMEQGPSTGTIKYPEVAELFDMLGDKCTLEVAQSSAKCRLIWKDGHFCALPSGLWSAVTTPLFTLKDKFRILGEPWRRKGTDPNESVGALAERRLGRSFVDYAVDPFLSGVYAGDPYKLPTRLALPKLYNLEQHYGSFIKGAMALAKAPKSDRDKRATKEVFSTRGGFRSLVSALAKTIGDDRITTGCAHLHVEPLGDKWKLSWGENTIIADQVVTTCPAYSLPDLLTFLPKEQLDDLSNLYYAPVIEIGVGMKHTGNVHWNAFGGLVPSKEQQKVLGILMPSACFVGRSPEEGATYAFFIGGARHPEYLDKTDEELRELVNTSLHTMLGYPKGTQADAIRIYRHSHAIPQYMTETDSRLRAIDTVEHTYPSLHIIGNLKDGIGMGDRIKQAVDLAERIG

SEQ ID NO: 89 - protein, 436 aa, Flexithrix
MVGIIGAGISGLSLAYHLQKLGKAYCLFEAGDKPGGNICSVKKEGFLLEKGPNSLLADSEIIDLVKELGLEDQMIIPETVSKKRYIFKNGKYQQLPSSPPGLIFNNFFSWHAKFSIYKELNNKSTSPQNETVADFFERRFCKEIVDQAVNPFISGIYAGDPEKLIMEKTFPAFLENEQKFGSVIRGFIKNKKNTQRKLTFSFKEGLGILADKLAENLSVNYNSPIKEIRQEAGGFLLITENGETKVTALVFSIPAYAAGKLIKDISPESAQAWEGVNYPPICVVHTAFRRKDLGFDFNGFGGLNPKKEDLFTAGSIWNSSLFENRSPKDQFLITSFVGGAQSLDNFQLTDEEIKAKVTDELQQNFKIKGSPTHQEITRWEKSIPQYDIDIFPAHQAIENLQREGIYVCSNWEGGVSVPDCIKKGKQLAERIKENKF

SEQ ID NO: 90 - protein, 469 aa, Geobacter
MKKVIVVGGGISGLATAFELRNKGAEAGIELDVTLLEKEERVGGKIWSIKEEGYLCEWGPNGFLDSKPQTLDLCRDLGASERLLRSNDNARKRFIYTGGVLNRLPENGPTFLKSSLISWPGKLRLAMEPFISKRTDGTDETLASFGRRRLGEEALQKLISPMVSGIFAGDPETMSLRSCFPRIAELEDEYGSLIKAMIKLAKKKKQEAAQGKAVSSAAGPGGVLTSFRWGIQELTDILAEQLGSATVVTGQPVTGLTRGSSVPWRLKTPTVDIDADVVILASPAHATAGIVSGVDAAMAQVLGEIPYASMTVVCFGFERERIAYDLNGFGYLIPKDEGMNTLGTLWDSSIFENRAPEGKVLLRSMLGGACFPEYVKLSDAEVMQRVKADLKATMGITADPSFIRIFRHPQAIPQYTVGHGKRLAALQERSSALPGLFLTGNSYRGIGLNDCATAANRTTDEVVAYLKGR

SEQ ID NO: 91 - protein, 498 aa, Synechococcus
MQAEVVVVGAGISGLTLALRLQQGLSPKDESTQPLLLAEASSRVGGCISTQSKDSYRWEEGPNSFTPVPALLNLIAEVGLAEHLVLADAKLPRYIYWEKELLPVPLSPSAAIGSRLLSVGGKLRALRGLLGFVAPPPGGEETVRQFFRRQLGSEVVERLVEPFTSGVYAGDPDQLSALAAFPRIAGLEERYGSLFAGAVQALRSRYRYATLPRTRHQDSANSPIQPPPKRGQLGNLRQGLQQLPEAIAQKLGSALRLGWRAVHLKRDETGYRVGFVIHDSGAEHTAPEEIHWVAAQQVVLTLPAYAAATLLQDLNPQASRLLREIPYPPVAVVALAYPEEALPQPLRGFGHLIPRSQGLRTLGTIWASSLFPERAPQGYHCLISFIGGATDAAFARQKGIPPITALSPDERAQIVHAELSQILLTRPVEPIRLGERLWPQAIPQYTLGHRQRIAQLQASLADQTPGVWVCANYLDGVALGDCVRRAEALAQQILSVRR

SEQ ID NO: 92 - protein, 475 aa, Crinalium
MVDTLIIGAGISGLSLAYALHQDGRKVLLCERQERVGGNITTGKAGGFLWEEGPTSFTPTPALLKLAVDVGLREELVLADHRLPRFVYWKGQLLPVPMSPPSAVTSKLLSLSGKFRALVGALGFIPPAIGNHLSQQGGEETVAQFFKRHLGTEVAERLVAPFVSGVYAGDVHQLSARSAFRRIAQLENVGGGLVSGAILSRKQRQQQKPPTDPSLPTVRRGELGSFKEGLQSLPKAIASHLGENIKLNWTLTELRQTANQTYIAEFSTPEGSQQVEARTVVLTTPAYVTAELLHNLAPNASIALKEIPYPSVACVVLAYPDDALKFPLKGFGNLIPRGQGIRTLGTIWSSSLFPGRAPQGWQMLTNFIGGATDPEVGNLDNEQLVQAVHKDLQRVLLKKDVPPKAIAVHLWKRAIPQYTLGHHLRLAQINQDLAQLPGLYLCSNYTDGVSLGDCVQRAYDQLPIINKQLSIINDN

SEQ ID NO: 93 - protein, 486 aa, Planctomyces
MNQSAPAKRIAVVGGGITGLSAAFHLQELAQEKNQPVEVTLFESQPEAGGWIGTISQDGYRIDTGADMFITNKPAAIELCQRLGLEDQLISTNQQYRGALILKDGTPVPVPLGFELMTPSRILPMLKTPLLSPIGKLRMGLEYFLPRRTSESGLDADDESLAQFVTRRFGREALTRLIQPLVAGIYTSDPEKLSLRATLPRFLDMERDHRSLIKAIRKQKKQTKSADATGARYGLFAAFKEGMQTLIRTLADRVSSTGTILYEHRVTHVAAADSGYDLTIESTVETQTQHFDAVLLTTAAPQAGQMLEAYAPVLSGLLKQIEYASTAIQVSVYRQENIKHPLHAFGLVIPAAEQRKIFAVAFASRKFPGRAPEGCVQLRTFVGGAMQPELLEHSDDELNAIVNQELADILGVSGEPIFSKLLRHNQSMPQYHLGHLQLVERIEQSAATLAGLELAGNAYRGVGIPDCIHSAEQAAERLLVDLTARV

SEQ ID NO: 94 - protein, 471 aa, Geobacter
MKKAIVVGGGISGLASAYLLREKAKNSGMELEITIVEKEDRTGGKIRSIKEDGYLCEWGPNGFLDSKPQTLDLCRELKVDSQLLRSNDNARKRFIYSGGVLNRLPENGPSFLKSRLISWPGKLRLALEPTPFIAKAPEGVDETLAAFGRRRLGDEALRKLIAPMVSGIFAGDPETMSLVSCFPRIAELEREYGGLVKAMVKLAKKKKQEIAEGKQVASAAGPGGVLTSFRDGIQTLTDILNERLGKDMLVIGAEVTGVSRGNSTPYRVQTGGRELDADIVVLATPAYATAQALEGIDGGMSATLNQIPYATMTVVCFGYEQEKVAHDLNGFGYLIPKAEGMNILGTLWDSSIFENRAPEGKVLLRSMMGGACFPEYIRLSDAEVVQKVRDNLKTIMGIKEAPEFVRIFRHEKAIPQYTVGHGRRLAALEEQAKSHPGLFLSGNSYRGIGLNDCVAAANRTADEVVAFLQSR

SEQ ID NO: 95 - protein, 446 aa, Acidithiobacillus
MEDVIIIGAGISGLATAYFLRKQGWSPLLLEAAAKPGGNLQSRQEEGYLRDMGPNSLMLKGHIVPEWLRELRLEEDIVEANPLAKRRYILNRHRQPVALGPGVLFGGGLLSWRGRLRLLGEPFRSPRRMQDSEESVADFVRRRLGEEALTWLVDPFISGVFAGNPARLSVQATLPRLIALEQDGGSLLRGALRARNKKSPDTPKTRLISFREGLQTLPLRVASALGDALRCNTPVEQLGNSDGSWQVSSGSQTWQSKRLILALPAGAAARLLAPTDAALAHELDAIPYPAVGSLSIGFQRMQVQHPLDGFGILIPRVMGLETLGILFSSTLFPGRAPADQVLLTAFIGGSQNDISGRDDDDLLATALREICPLLGISGKPVFSRCQTWPKAIPQYEIGHLDRIKRIDALSARHPGLYFRANWREGVALGDCMEEAYRFSQDVGWQR

SEQ ID NO: 96 - protein, 454 aa, Prevotella
MEERKIVVVGAGLTGLTCAAYLRRKGQDVVVLEAADRIGGLMQTEEVDGFVMEQGPSTGTIKYPEVAELFDMLGDDCTLEVAQSSAKCRLIWKDGRFHALPSGLWSAITTPLFTLKDKFRILGEPWRKKGIDPNESVGSLAERRLGRSFVDYAVDPFLSGVYAGDPYQLPTRLALPKLYDLEQRYGSFIKGAMALAKQPKTDREKRATKAVFSTRGGFRSLVSALGRVIGDERIRTNCKELSIEPLGDKWKLSWGENTIIAEQVITTCPAYALPKLLNFLPKEQLDDLSNLYYAPVIEIGVGMKNTGDVHWNAFGGLVPSKEKQNVLGVLMPSACFQGRSPKEGANYACFIGGACHPEYINKTDEELIGLVNTSLHTMLGYPKGTCADVIRIYRHSHAIPQYMPETDARLRTIDAVELAYPGLHIIGNLKDGIGMGDRIKQAVDMAEKISLSVS

SEQ ID NO: 97 - protein, 458 aa, Thermovibrio
MRVCVIGGGVSGLSTAFYLKRGGAQVKLLERENYPGGKARTYYEKGYIVESGPNGFLDGKPDTLELVKLLGAEKLLYRSSDKARKRFIYKNGRLVRLPENPIAFLSSYLLSWKGKVRVLGELLVPPSEKEDETLAEFVRRRLGKEALDYLLDPMVAGIFAGDPERMSLKAAFPTIYRLEREYGGLIRGLIAKAKEAKKKGAKSSGPAGPGGVLTSFVKGMSQFTQLLAQELGESFTPEAQVKTLEKKKDKWLVTYTLRGKEKSEEFDAVVLSLPAYAAAQVLKETSRELSELLASIEYSPISVVALGFEKRGLGHNLDGFGFLVPKVEGRKILGALWDSSVFPNRAPEGKALIRVMIGGARQPELALKSEEELTEIALKELKRIMKIRHYPEMVKVFRHEKGIPHYTIGHAEKVERIFKLGRELGNLFFCNNAYKGVGINDCTKSARETAEEVLNSLC

SEQ ID NO: 98 - protein, 536 aa, Brassica
MDLSLLRPQPFLSPFSNPFPRSRPYKPLNLRCSVSGGSVVGSSTIEGGGGGKTVTADCVIVGGGISGLCIAQALVTKHPDAAKNVMVTEAKDRVGGNIITREEQGFLWEEGPNSFQPSDPMLTMVVDSGLKDDLVLGDPTAPRFVLWNGKLRPVPSKLTDLPFFDLMSIGGKIRAGFGAIGIRPSPPGREESVEEFVRRNLGDEVFERLIEPFCSGVYAGDPAKLSMKAAFGKVWKLEENGGSIIGGAFKAIQAKNKAPKTTRDPRLPKPKGQTVGSFRKGLTMLPEAISARLGDKVKVSWKLSSITKLASGEYSLTYETPEGIVTVQSKSVVMTVPSHVASSLLRPLSDSAAEALSKLYYPPVAAVSISYAKEAIRSECLIDGELKGFGQLHPRTQKVETLGTIYSSSLFPNRAPPGRVLLLNYIGGATNTGILSKSEGELVEAVDRDLRKMLIKPSSTDPLVLGVKVWPQAIPQFLIGHIDLVDAAKASLSSSGHEGLFLGGNYVAGVALGRCVEGAYETATQVNDFMSRYAYK

SEQ ID NO: 99 - protein, 521 aa, Brassica
MASNAVADHDKPVSGKRVAVVGAGVSGLAAAYKLKSKGVNVTVFEADGRVGGKLRSVMHNGLIWDEGANTMTEAEPEVGSLLDDLGLREKQQFVSTFHALSIMFQPLSQKKRYIVRNGLPVMIPTNPIALVTSSVLSTQSKFQILLEPFLWKKNDSSSKVSDASVVESVSGFFQRHFGQEVVDYLIDPFMGGTSAADPESLSMKHSFPDLWNIEKSFGSIIVGAIRSKFAAKGSKNGETKSSTGTKKGSRGSFSFKGGMQILPDMLCKDLSREDLNLDSKVLSLSYNTGPREENWSLSCVSHNETQRQNLHYDAVVMTAPLCNVKEMKVMKGGEPFKLNFLPEIKYMPLSVIITTFTKEKVKRPLEGFGVLIPSIEQKHGFKTLGTLFSSMMFPDRCPSDLHLYTTFIGGSRNQELAKASTDELKQVVTSDLQRLLGIEGEPVFVNHVYWNKAFPLYDRSYDSVMEAIDKMEKDLPGFFYAGNHRGGLSVGKSIASGCKAADLVISYLESCSNDNKPEDSL

SEQ ID NO: 100 - protein, 539 aa, Gossypium
MTALIDLSLLRSSPSVSPFSIPHHQHPPRFRKPFKLRCSLAEGPTISSSKIDGGESSIADCVIVGGGISGLCIAQALATKHRDVASNVIVTEARDRVGGNITTVERDGYLWEEGPNSFQPSDPILTMAVDSGLKDDLVLGDPNAPRFVLWEGKLRPVPSKPTDLPFFDLMSIAGKLRAGFGAIGIRPPPPGYEESVEEFVRRNLGAEVFERFIEPFCSGVYAGDPSKLSMKAAFGRVWKLEEIGGSIIGGTFKTIQERNKTPKPPRDPRLPKPKGQTVGSFRKGLTMLPEAIANSLGSNVKLSWKLSSITKLGNGGYNLQFETPEGMVSLQSRSVVMTIPSHVASNLLHPLSAAAADALSQFYYPPVASVTVSYPKEAIRKECLIDGELKGFGQLHPRSQGIETLGTIYSSSLFPNRAPSGRVLLLNYIGGATNTGILSKTEGELVEAVDRDLRKMLINPNAKDPLVLGVRVWPKAIPQFLVGHLDLLDSAKMALRDSGFHGLFLGGNYVSGVALGRCVEGAYEVAAEVKEFLSQYAYK

SEQ ID NO: 101 - protein, 503 aa, Gossypium
MASTENKDDHSSAKRVAVIGAGVSGLAAAYKLKSQGLHVTVFESEGRAGGKLRSVSREGLIWDEGANTMTESEIEVRSLFDDLGIQDKEQVPIAQNKRYIVRNGVPVLIPSNPLALFTSSILSAKSKFQIILEPFLWRKSEASKVSDAYNQESVGGFFQRHFGQEVVDYLVDPFVAGTSAGDPESLSMCHSFPELWDLEQRFGSIIVGAVKSKFSAKRTNREETKNSVKRKALRGSFSFQGGMQTLADMLCKDLSKDELKLKSKVLSLSYSHEGKSTSENWSLSYASDRDKRSQGSSFDAVIMTAPVCNVKEMKITKGGNVFPLNFIPEVSYMPLSVIITAFKKENVKKPLEGFGVLIPSKEQQNGLKTLGTLFSSVMFPDRAPNNLYLYTTFVGGNRNKELAKASTDELKHIVTSDLQQLLGVEGEPTFFNHFYWSKAFPLYGRNYASVLEAIEKIERDLPGFFYAGNHKGGLSVGKSIASGCKAADNVITYLESSHDKLLK

SEQ ID NO: 102 - protein, 535 aa, Conyza
MTSLTNFTPLKLTNPNYLTTTTTYNHRKLSNFRFRCSIARDSPTAPSISGDSSSRPLLDCVVVGAGISGLCIAQALSTKHGGDVVVTEARERVGGNISTVERDGYLWEEGPNSFQPSDPMLTMVVDSGLKDDLVLGDPTAPRFVLWDGDLKPVPSSPSDLPTFDLMSLGGKLRAGFGALGIRPPPPDREESVEEFVRRNLGDEVFERLIEPFCSGVYAGDPSKLSMKAAFGKVWKLEQNGGSIVGGAFKAIQAKNKSTKPPRDPRLPTPKGQTVGSFRKGQAMLPNAISKGLGSRVKLSWELVGITKSENRGYSLTYRTPDGLESLQTKTVVMTVPSYVASDLLRPLSVEAADALSKFYYPPVAAVSVSYPKEAIRADRLIDGQLKGFGQLHPRSQGVETLGTIYSSSLFPNRAPPGRVLLLNYIGGATNPGILSKTESQIVEAVDRDLRKMLINPKAGEPLTLGVKVWPRAIPQFLIGHYDILEAAKCALSLAGYRGMFLGGNYVSGVALGRCVENAYEVAADVSNFLSRGVYK

SEQ ID NO: 103 - protein, 498 aa, Conyza
MASPTTTTDDNKEKAPAKRVAVVGAGVSGLAAAYKLKLHGINVTVFEAGEIAGGKLRSISQNGLIWDEGANTMTESEPDVSRLLDDLGLRDKQQSPLSQHKRYIVRNGKPVLVPSNPIALIQSSLLSTQSKLQILLEPFSWKKKNSSDTQESVGAFFQRHFGKEVVEYLINPVVAGTSGGDPESLSMRYSFPELWDLERRFGSLISGAFQSMISSRGRKKSPSGSSKRRRGSFSFLGGMQTLTNALSKEVGQHELNLQSKVLEMSYSCDDNTTGNWSIYCAPDQNKQLNQQPFDAVIMTAPLGNVKEMKITKTGSPFLLNFIPELSYMPVSVIISTFKKENVKRPLEGFGMLVPAKEQENGLKTLGTLFSSMMFPDRAPEDLYLYTTFVGGSRNKELANASRDELKQIVTSDLRQLLGAEGEPQFLTHYYWSKAYPLYGRDYGLVMEAIEKMERELPGYFYAGNHKGGLAVGKAISSGCKAAESVISYLDSYSDEKRC

SEQ ID NO: 104 - protein, 565 aa, Kochia
MSAMASPSIIPQSFLQRSPTSLQSRSNYSKNHIIISISTPCSHGKNQRRFLRKTTHFRSIHCSTISTSTPTSSSNPGTLGEGGLLDCVIVGGGISGLCIAQALSTKYSSLSTNFIVTEAKDRVGGNITTKEDDGYIWEEGPNSFQPSDAVLTMAVDCGLKDELVFGDPKAPRFVLWNGKLRRVPSKLTDLPFFDLMSFPGKIRAGLGALGFRPSPPGREESVEDFVRRNLGDEVFERLIEPFCSGVYAGDPAKLSMKAAFGRVWVLEQMGGNIIGGALKTIQEKKNKPKPPRDPRLPKPKGQTVGSFRKGLIMLPNAISARLGSKVKLSWTLASISKTHNGEYNLIYDTPDGPVSVRTKSIVMTIPSYVASSLLRPFSDAAADSLSKFHYPPVAAVSLSYPEEAIRPECLIDGKLQGFGQLHPRSQGVETLGSIYSSSLFPGRAPPGRTMILSFIGGATNPGIVDKTQDELAKTVDKDLRRILINPSAKDPRVLGVKVWPQAIPQFLIGHFDLLDAAKAALTDAGCKGLFLGGNYVSGVALGRCIEGAYESAAEVVDFLSQYSDK

SEQ ID NO: 105 - protein, 531 aa, Lolium
MVGATMATATVTAALPLRLRVPARSRRGQTRCAVASDATEAPAVPSARLSADCVIVGGGISGLCTAQALATKYGVTDLLVTEARARAGGNITTVERPDEGYLWEEGPNSFQPSDPVLTMAVDSGLKDDLVFGDPNAPRFVLWQGKLRPVPSKPGDLPFFDLMSIPGKLRAGLGALGIRPPPPGREESVEEFVRRNLGAEVFERLIEPFCSGVYAGDPSKLSMRAAFGKVWRLEENGGSIIGGTIKAIQDRGKNPKPPRDPRLPTPKGQTVASFRKGLAMLPNAIASRLGSKVKLSWKLTGITKSDNQGYVLAYETPEGVVSVQAKSVIMTIPSYIASEILRPLSSDAADGLSKFYYPPVAAVTVSYPTEAIRKECLIDGELQGFGQLHPRSQGVETLGTIYSSSLFPNRAPAGRVLLLNYIGGATNTGIVSKTESDLVEAVDRDLRKMLINPTAPDPLALGVRVWPQAIPQFLIGHLDRLDAAKSALARGGCSGLFLGGNYVAGVALGRCIEGAYESASEVSDFLTKYAYK

SEQ ID NO: 106 - protein, 509 aa, Lolium
MAASDDPRAAPARSVAVVGAGVSGLVAAYRLRKSGVRVTVFEADDRAGGKIRTNSDGGFLWDEGANTMTESALEASRLIDDLGLEGRLQYPNSQHKRYTVKDGAPALIPSDPIALMKSSLLSTKSKFKLFLEPFLYEKSSTNNSKKVSDEHIRESVGSFFERHFGKEVVDYLIDPFVAGTSAGDPESLSIRHAFPALWNLEKKYGSIIAGAILSKLTAKGDSTKKGSAVSGKGRNKRVSFSFHGGMQTLVDALHKEIGDGNVKLATQVLSLACSCDGLSASNGWSIFVDSKDASNRELAKNQPFDAVIMTAPLSNVQRMKFTKGGAPFVLDFLPKVDYLPLSLMVTAFKKEDVKRPLEGFGVLVPYKEQQKHGLKTLGTLFSSMMFPDRAPNDQHLFTTFVGGSHNRDLAGAPTAILKQLVTSDLRKLLGVEGQPTFVRHIHWKNAFPLYGHDYDSALEAIGKMESDLPGFFYAGNNKDGLAVGNVIASGSKTADLVISYLELGIKRDN

SEQ ID NO: 107 - protein, 539 aa, Gossypium hirsutum
MTALIDLSLLRSSPSVSPFSIPHHQLPPRSRKPFKLRCSLAEGPTISSSKIDGGESSIADCVVVGGGISGLCIAQALATKHRDVASNVIVTEARDRVGGNITTVERDGYLWEEGPNSFQPSDPILTMAVDSGLKDDLVLGDPNAPRFVLWEGKLRPVPSKPTDLPFFDLMSIAGKLRAGFGAIGIRPPPPGYEESVEEFVRRNLGAEVFERFIEPFCSGVYAGDPSKLSMKAAFGRVWKLEEIGGSIIGGTFKTIQERNKTPKPPRDPRLPKPKGQTVGSFRKGLTMLPEAIANSLGSNVKLSWKLSSITKLGNGGYNLTFETPEGMVSLQSRSVVMTIPSHVASNLLHPLSAAAADALSQFYYPPVASVTVSYPKEAIRKECLIDGELKGFGQLHPRSQGIETLGTIYSSSLFPNRAPSGRVLLLNYIGGATNTGILSKTEGELVEAVDRDLRKMLINPNAKDPLVLGVRVWPKAIPQFLVGHLDLLDTAKMALRDSGFHGLFLGGNYVSGVALGRCVEGAYEVAAEVKEFLSQYAYK

SEQ ID NO: 108 - protein, 560 aa, Beta vulgaris
MKSMALSNCIPQTQCMPLHSSGHYRGNCIMLSIPCSLIGRRGYYSHKKRRMSMSCSTSSGSKSAVKEAGSGSGSGAGGLLDCVIVGGGISGLCIAQALCTKQSSLSPNFIVTEAKDRVGGNIVTVEADGYIWEEGPNSFQPSDAVLTMAVDSGLKDELVLGDPNAPRFVLWNDKLRPVPSSLTDLPFFDLMTIPGKIRAALGALGFRPSPPPHEESVEHFVRRNLGDEVFERLIEPFCSGVYAGDPAKLSMKAAFGKVWKLEQKGGSIIGGTLKAIQERGSNPKPPRDQRLPKPKGQTVGSFRKGLVMLPTAISARLGSRVKLSWTLSSIVKSLNGEYSLTYDTPDGLVSVRTKSVVMTVPSYVASRLLRPLSDSAADSLSKFYYPPVAAVSLSYPKEAIRSECLINGELQGFGQLHPRSQGVETLGTIYSSSLFPGRAPPGRILILSYIGGAKNPGILNKSKDELAETVDKDLRRMLINPDAKLPRVLGVRVWPQAIPQFSIGHFDLLDAAKAALTDTGVKGLFLGGNYVSGVALGRCIEGAYESAAEVVDFLSQYSDK

SEQ ID NO: 109 - protein, 530 aa, Hordeum vulgare
MAGAGATMATATAPPLRGRVTRRPHGVRPRCAAAGSATETPAAPGVRLSADCVIVGAGISGLCTAQALATRHGVGDLLVTEARDRPGGNITTVERPDEGYLWEEGPNSFQPSDPVLTMAVDSGLKDDLVFGDPNAPRFVLWEGKLRPVPSKPGDLPFFSLMSVPGKLRAGLGALGIRPPPPGREESVEEFVRRNLGAEVFERLIEPFCSGVYAGDPSKLSMKAAFGKVWRLEEIGGSIIGGTIKAIQDKGKNPKPPRDPRLPAPKGQTVASFRKGLAMLPNAIASRLGSKVKLSWKLTSITKADNQGYVLGYETPEGLVSVQAKSVIMTIPSYVASDILRPLSIDAADALSKFYYPPVAAVTVSYPKEAIRKECLIDGELQGFGQLHPRSQGVETLGTIYSSSLFPNRAPAGRVLLLNYIGGSTNTGIVSKTESDLVEAVDRDLRKMLINPRAADPLALGVRVWPQAIPQFLIGHLDRLAAAKSALGRGGYDGLFLGGNYVAGVALGRCIEGAYESASQVSDFLTKYAYK

SEQ ID NO: 110 - protein, 554 aa, Hordeum vulgare
MLTSATAPPSSSSCSSHAPARFASPSRPRRSASASARGRGRRVRPVLAMAASDDPRARSVAVVGAGVSGLVAAYMLRKSGVRVTVFEAEDRAGGKIRTNSDGGFLWDEGANTMTESALEASRLIDDLGLQDRLQYPNSQHKRYTVKDGAPALIPSDPIALMKSTVLSTKSKFKLFLEPFLYEKSSTRNSKKVSDEHLRESVGSFFERHFGKEVVDYLIDPFVAGTSAGDPESLSIRHAFPGLWNLEKKYGSLIVGAILSKLTAKGGSAKKGGASSGKGRNKRASFSFHGGMQTLVDALHKEVGDTNVKLGTQVLSLACNCDGLSASDGWSIFVDSKDASSKELARNQSFDAVIMTAPLSNVQRMKFTKGGRPFVLDFLPKVDYLPLSLMVTAFKKEDVKRPLEGFGVLIPFKEQQKHGLKTLGTLFSSMMFPDRAPNDQHLFTTFIGGSHNRDLAGAPTAILKQFVTSDLTKLLGVEGQPTFVKHIHWRNAFPLYGHDYDLALEAIGKMEGDLPGFFYAGNNKDGLAVGNVIASGSNTADLVISYLESGIKHVN

SEQ ID NO: 111 - protein, 531 aa, Triticum aestivum
MAGATMATATVAAASPLRGRVTGRPHRVRPRCATASSATETPAAPGVRLSAECVIVGAGISGLCTAQALATRYGVSDLLVTEARDRPGGNITTVERPDEGYLWEEGPNSFQPSDPVLTMAVDSGLKDDLVFGDPNAPRFVLWEGKLRPVPSKPGDLPFFSLMSIPGKLRAGLGALGIRPPPPGREESVEEFVRRNLGAEVFERLIEPFCSGVYAGDPSKLSMKAAFGKVWRLEEIGGSIIGGTIKAIQDKGKNPKPPRDPRLPAPKGQTVASFRKGLAMLPNAIASRLGSKVKLSWKLTSITKADNQGYVLGYETPEGLVSVQAKSVIMTIPSYVASDILRPLSIDAADALSKFYYPPVAAVTVSYPKEAIRKECLIDGELQGFGQLHPRSQGVETLGTIYSSSLFPNRAPAGRVLLLNYIGGSTNTGIVSKTESDLVGAVDRDLRKMLINPRAADPLALGVRVWPQAIPQFLIGHLDRLAAAKSALGQGGYDGLFLGGNYVAGVALGRCIEGAYESASQVSDFLTKYAYK

SEQ ID NO: 112 - protein, 501 aa, Solanum lycopersicum; identical to SEQ ID NO: 21

SEQ ID NO: 113 - protein, 546 aa, Triticum aestivum
MGIHPAALTFPRATEMAGATMATATVAAASPLRGRVTGRPHRVRPRCATASSATETPAAPGVRLSAECVIVGAGISGLCTAQALATRYGVSDLLVTEARDRPGGNITTVERPDEGYLWEEGPNSFQPSDPVLTMAVDSGLKDDLVFGDPNAPRFVLWEGKLRPVPSKPGDLPFFSLMSIPGKLRAGLGALGIRPPPPGREESVEEFVRRNLGAEVFERLIEPFCSGVYAGDPSKLSMKAAFGKVWRLEEIGGSIIGGTIKAIQDKGKNPKPPRDPRLPAPKGQTVASFRKGLAMLPNAIASRLGSKVKLSWKLTSITKADNQGYVLGYETPEGLVSVQAKSVIMTIPSYVASDILRPLSIDAADALSKFYYPPVAAVTVSYPKEAIRKECLIDGELQGFGQLHPRSQGVETLGTIYSSSLFPNRAPAGRVLLLNYIGGSTNTGIVSKTESDLVGAVDRDLRKMLINPRAADPLALGVRVWPQAIPQFLIGHLDRLAAAKSALGQGGYDGLFLGGNYVAGVALGRCIEGAYESASQVSDFLTKYAYK

SEQ ID NO: 114 - protein, 539 aa, Gossypium hirsutum
  VARIANT (137)..(137): Xaa can be any naturally occurring amino acid
  VARIANT (156)..(156)
  VARIANT (168)..(168): Xaa can be any naturally occurring amino acid
MTALIDLSLLRSSPSVSPFSIPHHQLPPRSRKPFRLRCSVAEGPTISSSKIDGGESSIADCVVVGGGISGLCIAQALATKHRDVASNVIVTEARDRVGGNITTVERDGYLWEEGPNSFQPSDPILTMAVDSGLKDDXVLGDPNAPRFVLWEGKLRXVPSKPTDLPFFXLMSIAGKLRAGFGAIGIRPPPPGYEESVEEFVRRNLGAEVFERFIEPFCSGVYAGDPSKLSMKAAFGRVWKLEEIGGSIIGGTFKTIQERNKTPKPPRDPRLPKPKGQTVGSFRKGLTMLPEAIANSLGSNVKLSWKLSSITKLGNGGYNLTFETPEGMVSLQSRSVVMTIPSHVASNLLHPLSAAAADALSQFYYPPVASVTVSYPKEAIRKECLIDGELKGFGQLHPRSQGIETLGTIYSSSLFPNRAPSGRVLLLNYIGGATNTGILSKTEGELVEAVDRDLRKMLINPNAKDPLVLGVRVWPKAIPQFLVGHLDLLDSAKMALRDSGFHGLFLGGNYVSGVALGRCVEGAYEVAAEVKEFLSQYAYK

SEQ ID NO: 115 - protein, 503 aa, Gossypium hirsutum
MASTENKDDHSSAKRVAVIGAGVSGLAAAYKLKSQGLHVTVFESEGRAGGKLRSVSRDGLIWDEGANTMTESEIEVRSLFDDLGIQDKQQVPIAQNKRYIMRNGVPVLIPSNPLSLFTSSILSAKSKFQIILEPFLWRNSEASKVSDAYNQESVGGFFQRHFGQEVVDYLVDPFVAGTSAGDPESLSMCHSFPGLWDLEQRFGSIIVGAVKSKFSAKRTNREETKNSVKRKALRGSFSFKGGMQTLADMLCKDLSKDELKLKSKVLSLSYSHEGKSTSENWSLSYASDRDKRSQGSSFDAVIMTAPVCNVKEMKITKGGNVFPLNFIPEVSYMPLSVIITAFKKENVKKPLEGFGVLIPSKEQQNGLKTLGTLFSSVMFPDRAPNNLYLYTTFVGGNRNEKLAKASTDELKHIVTSDLQQLLGVEGEPTFFNHFYWSKAFPLYGRNYASVLEGIEKMERDLPGFFYAGNHKGGLSVGKSIASGCKAADNVITYLESSHDKLLK

SEQ ID NO: 116 - protein, 560 aa, Beta vulgaris
MKSMALSNCIPQTQCMPLHSSGHYRGNCIMLSIPCSLIGRRGYYSHKKRRMSMSCSTSSGSKSAVKEAGSGSGSGAGGLLDCVIVGGGISGLCIAQALCTKQSSLSPNFIVTEAKDRVGGNIVTVEADGYIWEEGPNSFQPSDAVLTMAVDSGLKDELVLGDPNAPRFVLWNDKLRPVPSSLTNLPFFDLMTIPGKIRAALGALGFRPSPPPHEESVEHFVRRNLGDEVFERLIEPFCSGVYAGDPAKLSMKAAFGKVWKLEQKGGSIIGGTLKAIQERGSNPKPPRDQRLPKPKGQTVGSFRKGLVMLPTAISARLGSRVKLSWTLSSIVKSLNGEYSLTYDTPDGLVSVRTKSVVMTVPSYVASRLLRPLSDSAADSLSKFYYPPVAAVSLSYPKEAIRSECLINGELQGFGQLHPRSQGVETLGTIYSSSLFPGRAPPGRILILSYIGGAKNPGILNKSKDELAETVDKDLRRMLINPDAKLPRVLGVRVWPQAIPQFSIGHFDLLDAAKAALTDTGVKGLFLGGNYVSGVALGRCIEGAYESAAEVVDFLSQYSDK

SEQ ID NO: 117 - protein, 508 aa, Brassica napus
MASNAVADHDKLSGKRVAVVGAGVSGLAAAYKLKSKGVNVTVFEADGRVGGKLRSVMHNGLIWDEGANTMTEAEPEVGSLLDDLGLREKQQFPLSQKKRYIVRNGLPVMIPTNPIALVTSSVLSTQSKFQILLEPFLWKKNDSSSKVSDASVVESVSGFFQRHFGQEVVDYLIDPFMGGTSAADPESLSMKHSFPDLWNIEKSFGSIIVGAIRSKFAAKGSKNGETKSSTGTKKGSRGSFSFKGGMQILPEMLCKDLSRDELNLDSKVLSLSYNAGPRQENWSLSCVSHNEAQGQNLHYDAVIMTAPLCNVKEMKVMKGGEPFKLNFLPEIKYMPLSVIITTFTKEKVKRPLEGFGVLIPTKEQKHGFKTLGTLFSSMMFPDRCPSDLHLYTTFIGGSRNQELAKASTDELKQVATSDLQRLLGVEGEPVFVNHVYWNKAFPLYDRSYDSVMEAIDKMEKDLPGFFYAGNHRGGLSVGKSIASGCKAADLVISYLESCSNDKKSEDSL

SEQ ID NO: 118 - DNA, 1638 bp, Triticum aestivum
atggggatccaccccgccgcactgacattcccccgagcgacagaaatggccggcgcaacaatggccaccgccaccgtcgcggccgcgtcgccgctccgcggcagggtcaccgggcgcccacaccgcgtccgcccgcgttgcgctaccgcgagcagcgcgaccgagactccggcggcgcccggcgtgcggctgtccgcggaatgcgtcattgtgggcgccggcatcagcggcctctgcaccgcgcaggcgctggccacccgatacggcgtcagcgacctgctcgtcacggaggcccgcgaccgcccgggcggcaacatcaccaccgtcgagcgtcccgacgaggggtacctgtgggaggagggacccaacagcttccagccctccgacccggtcctcaccatggccgtggacagcgggctcaaggatgacttggtgttcggggaccccaacgcgccccggttcgtgctgtgggaggggaagctgaggccggtgccgtcgaagccaggcgacctgcctttcttcagcctcatgagtatccctgggaagctcagggccggccttggcgcgctcggcattcgcccacctcctccagggcgcgaggagtcggtggaggagtttgtgcgccgcaacctcggtgccgaggtctttgagcgcctcatcgagcctttctgctcaggtgtatatgctggtgatccttcgaagcttagtatgaaggctgcatttgggaaggtctggaggttggaggagattggaggtagtattattggtggaaccatcaaggcgattcaggataaagggaagaaccccaaaccgccaagggatccccgacttccggcaccaaagggacagacggtggcatctttcaggaagggtctagccatgctcccgaatgccatcgcatctaggctgggtagtaaagtcaagctgtcatggaagcttacgagcattacaaaggcggacaaccaaggatatgtattaggttatgaaacaccagaaggacttgtttcagtgcaggctaaaagtgttatcatgaccatcccgtcatatgttgctagtgatatcttgcgcccactttcaattgatgcagcagatgcactctcaaaattctattatccgccagttgctgctgtaactgtttcatatccaaaagaagctattagaaaagaatgcttaattgatggggagctccagggtttcggccagttgcatccacgtagccaaggagtcgagactttagggacaatatatagctcttctctctttcctaatcgtgctcctgctggaagagtgttacttctgaactatatcgggggttctacaaatacagggatcgtctccaagactgagagtgacttagtaggagccgttgaccgtgacctcagaaaaatgttgataaaccctagagcagcagaccctttagcattaggggttcgagtgtggccacaagcaataccacagtttttgattgggcaccttgatcgccttgctgctgcaaaatctgcactgggccaaggcggctacgacgggmtgttcctaggaggaaactacgtmgcaggagttgccttgggccgatgcatcgagggtgcgtacgagagtgcctcacaagtatctgacttcttgaccaagtatgcctacaag

SEQ ID NO: 119 - DNA, 1617 bp, Gossypium hirsutum
  misc_feature (411)..(411): /note="n is a, c, g, or t"
  misc_feature (447)..(447): /note="n is a, c, g, or t"
  misc_feature (467)..(467): /note="n is a, c, g, or t"
  misc_feature (504)..(504): /note="n is a, c, g, or t"
  misc_feature (564)..(564): /note="n is a, c, g, or t"
  misc_feature (918)..(918): /note="n is a, c, g, or t"
  misc_feature (939)..(939): /note="n is a, c, g, or t"
  misc_feature (1008)..(1008): /note="n is a, c, g, or t"
atgacggctctaatcgacctttctcttctccgctcctcgccctccgtttcccctttctccataccccaccaccagcttccgccccgctctcgtaaacctttcaggctccgatgctccgtcgccgagggtcccacgatttcctcatctaaaatcgacgggggagaatcatccatcgcggattgcgtcgtcgttggaggtggtatcagtggactttgcattgctcaagctctcgccaccaagcaccgtgacgtcgcttccaatgtgattgtgacggaagccagagaccgtgttggtggcaacatcactaccgttgagagagatggatatctgtgggaagaaggccccaacagttttcagccctccgatcctattctaaccatggccgtggatagtggattgaaggacgatttngttttaggtgaccctaatgcaccgcgatttgtactntgggagggaaaactaaggcntgtgccctccaagccaaccgacttgccgttttttganttgatgagcattgctggaaaacttagggctgggttcggggctattggcattcggcctccncctccgggttatgaagaatcggtggaggagtttgtgcgccgtaatcttggtgctgaggtttttgaacgctttattgaaccattttgttcaggtgtttatgcaggggatccttcaaaattaagcatgaaagcagcatttggaagagtatggaagctagaagagattggtggcagcatcattggtggcactttcaagacaatccaggagagaaataagacacctaagccacccagagacccgcgtctgccaaaaccgaagggccaaacagttggatcttttaggaagggacttaccatgctgcctgaggcaattgctaacagtttgggtagcaatgtaaaattatcttggaagctntccagtattaccaaattgggnaatggagggtataacttgacatttgaaacacctgaaggaatggtatctcttcagagtagaagtgttgtnatgaccattccatcccatgttgccagtaacttgttgcatcctctctcggctgctgctgcagatgcattatcccaattttattatcctccagttgcatcagtcacagtctcctatccaaaagaagccattcgaaaagaatgtttgattgatggtgaacttaaggggtttggccagttgcacccacgcagccaaggaattgaaactttagggacgatatacagttcatcacttttccccaatcgagctccatctggcagggtgttgctcttgaactacataggaggagctaccaacactggaattttgtccaagactgaaggggaacttgtagaagcagttgatcgtgatttgagaaaaatgcttataaatcctaatgcaaaggatcctcttgttttgggtgtaagagtatggccaaaagccattccacagttcttggttggtcatttggatctccttgatagtgcaaaaatggctctcagggattctgggtttcatggactgtttcttgggggcaactatgtatctggtgtggcattaggacggtgtgtggaaggtgcttacgaggttgcagctgaagtgaaggaattcctgtcacaatatgcatacaaa

SEQ ID NO: 120 - DNA, 1509 bp, Gossypium hirsutum
  misc_feature (630)..(630): /note="n is a, c, g, or t"
atggcgtcaactgaaaacaaagatgaccactcttctgctaaaagagtagctgtcattggcgctggtgttagtggactcgcggcagcttacaagttgaaatcacaaggtttacatgttacggtatttgaatctgaaggaagagctggagggaagttaagaagtgtttcgagggatggtttgatatgggatgaaggagcaaatacaatgactgaaagtgagattgaagtgagaagtttgtttgatgatcttggtattcaagataagcaacaagttccaattgcacagaacaagcggtatatcatgagaaatggcgtgcctgtattgatcccctcaaatcctctctcattattcacaagcagcattctttcagcaaaatcgaagtttcagattattttggagccttttctgtggagaaacagtgaagcctcaaaagtatctgatgcttataatcaggaaagtgtgggaggattttttcagcgccattttgggcaggaggttgtggattaccttgttgatccctttgttgctggcacaagtgctggagatcctgaatctctatctatgtgccattcctttccggggctatgggatcttgagcaaaggtttggctctatcattgttggagcagtnaaatctaaattctctgccaaaaggacaaatcgtgaagaaacaaaaaattcagtgaaaagaaaggctctacgtggctcattttccttcaagggtggaatgcagacacttgctgatatgttgtgcaaagatctttccaaagatgagcttaaactgaaatcaaaggttttgtcattatcttacagtcatgaggggaagtctacatcagagaactggtctctctcttatgcttctgatcgagacaagcgctcacaaggctcatcatttgatgctgtaataatgacggctccggtgtgcaatgttaaagaaatgaaaattactaaaggaggaaatgtctttccactgaacttcatccctgaggtgagttatatgccactatccgtcataattactgcttttaagaaggagaatgtcaagaaacccctagaaggttttggagttcttataccttcaaaggagcagcaaaatggtttaaaaactctcggtacacttttttcatctgtgatgtttcctgatcgtgcacctaataatttgtatctctatacaacctttgttggaggaaatcgaaatgagaagctggcaaaagcctcaacagatgaattgaagcatattgttacttccgaccttcagcagttgttgggagtggagggagaaccgacattcttcaatcatttctattggagcaaggcatttcccttgtatggccgtaactatgcttcggtcttggaaggcattgaaaagatggagagagatctccctggattcttctatgcaggtaaccacaaagggggattatcggtgggcaaatcgattgcttctggttgcaaagcagcagataatgtaattacatatttggaatcttcacatgacaagctgctgaaa

SEQ ID NO: 121 - DNA, 1680 bp, Beta vulgaris
atgaaatcaatggcgttatcaaactgcattccacagacacagtgcatgccattgcacagcagcgggcattacaggggcaattgtatcatgttgtcaattccatgtagtttaattggaagacgaggttattattcacataagaagaggaggatgagcatgagttgcagcacaagctcaggctcaaagtcagcggttaaagaagcaggatcaggatcaggatcaggagcaggaggattgctagactgcgtaatcgttggaggtggaattagcgggctttgcatcgcgcaggctctttgtacaaaacagtcctctttatccccaaattttatagtgacagaggccaaagacagagttggcggcaacatcgtcactgtggaggccgatggctatatctgggaggagggacccaatagcttccagccttccgacgcggtgctcaccatggcggtcgacagtggcttgaaagatgagttggtgctcggagatcccaatgctcctcgctttgtgctgtggaatgacaaattaaggcccgtaccttccagtctcaccaacctccctttcttcgacctcatgaccattcccggcaagattagggctgctcttggtgctctcggatttcgcccttctcctccacctcatgaggaatctgttgaacactttgtgcgtcgtaatctcggagatgaggtctttgaacgcttgattgaacccttttgttcaggtgtgtatgccggtgatcctgccaagctgagtatgaaagctgcttttgggaaggtctggaagttggagcaaaagggtggcagcataattggtggcactctcaaagctatacaggaaagagggagtaatcctaagccgccccgtgaccagcgcctccctaaaccaaagggtcagactgttggatcctttagaaagggactcgttatgttgcctaccgccatttctgctcgacttggcagtagagtgaaactatcttggaccctttctagtatcgtaaagtcactcaatggagaatatagtctgacttatgataccccagatggcttggtttctgtaagaaccaaaagtgttgtgatgactgtcccatcatatgttgcaagtaggcttcttcgtccactttcagactctgctgcagattctctttcaaaattttactatccaccagttgcagcagtgtcactttcctatcctaaagaagcgatcagatcagaatgcttgattaatggtgaacttcaaggtttcgggcaactacatccccgcagtcagggtgtggaaaccttgggaacaatttatagttcgtctcttttccctggtcgagcaccacctggtaggatcttgatcttgagctacatcggaggtgctaaaaatcctggcatattaaacaagtcgaaagatgaacttgccgagacagttgacaaggacctgagaagaatgcttataaatcctgatgcaaaacttcctcgtgtactgggtgtgagagtatggcctcaagcaataccccagttttctattgggcactttgatctgctcgatgctgcaaaagctgctctgacagatacaggggtcaaaggactgtttcttggtggcaactatgtttcaggtgttgccttggggcggtgtatagagggtgcttatgagtctgcagctgaggtagtagatttcctctcacagtactcagacaaa

SEQ ID NO: 122 - DNA, 1593 bp, Hordeum vulgare
atggccggtgcaggtgcaaccatggccaccgccaccgcgccgccgctccgcggcagggtcacccggcgcccgcacggcgtccgcccgcgttgcgcggccgcgggcagcgcgaccgagacccccgcggcgcccggcgtgcgtctgtccgcggactgcgtcatcgtgggcgccggcatcagcggcctctgcaccgcgcaggcgctggccacccggcacggcgtcggcgacctgctcgtcacggaggcccgcgaccgcccgggcggcaacatcaccaccgtcgagcgccccgacgaggggtacctctgggaggagggccccaacagcttccagccctccgaccccgtcctcaccatggccgtggacagcgggctcaaggatgacctggtgttcggggaccccaacgcgccccggttcgtgctgtgggaggggaagctgaggccggtgccgtccaagccaggcgacctgccgttcttcagcctcatgagcgtccccgggaagctcagggccggcctcggcgccctcggcattcgcccgcctcctccagggcgcgaggagtcggtggaggagtttgtgcgccgcaacctcggtgccgaggtctttgagcgccttatcgaacctttctgctcaggtgtgtatgctggtgatccttcgaagctcagtatgaaggctgcatttgggaaggtttggaggttggaggagattgggggtagtattattggtggaaccatcaaggcaattcaggataaagggaagaaccccaaaccgccaagggatccccgacttccggcaccaaagggacagacggtggcatctttcaggaagggtctggccatgctcccgaatgccatcgcatctaggttgggtagtaaagtcaagctgtcatggaagcttacgagcattacaaaggcggacaaccaaggatatgtattaggttatgaaacaccagaaggacttgtttcagtgcaggctaaaagtgttatcatgaccatcccgtcatatgttgctagtgatatcttacgcccactttcaattgatgcagcagatgcactctcaaaattctattatccgccagttgctgctgtaactgtttcatatccaaaagaagctattagaaaagaatgcttaattgatggggagctccagggtttcggccagctgcatccacgtagccaaggagtcgagactttagggacaatatatagctcttctctctttcccaatcgtgctcctgctggaagagtgttacttctgaactatatcgggggttctacaaatacagggatcgtctccaagaccgagagtgacttagtagaagctgttgatcgtgatctcagaaaaatgttgataaaccctagagcagcagaccctttagcattaggggtcagagtgtggccacaagcaataccacagtttttgattggacaccttgatcgccttgctgctgcaaaatctgcactgggccgaggcgggtacgacgggttattcctaggaggaaactacgtagcaggagttgccttgggccgatgcatcgagggtgcgtacgagagtgcctcacaagtatctgacttcttgaccaagtatgcctacaagtga

SEQ ID NO: 123 - DNA, 1665 bp, Hordeum vulgare
atgctcacttccgccaccgctcccccctcctcctcctcctgctcgtcccacgctcccgcccgcttcgcctccccgtcccggccccgtcgctccgcgtccgcgtccgcgcgcgggcgagggcgccgcgtccgccccgtgctcgccatggccgcctccgacgacccccgcgccaggtcggtcgccgtcgtcggcgccggcgtcagtgggctcgtggcggcgtacatgctgaggaagagcggcgtgcgggtcaccgtgttcgaggcggaagaccgcgcgggagggaagatacggaccaactccgacggcggattcctctgggacgaaggagccaacaccatgacagaaagtgcactggaggctagtaggctaatcgacgatcttggtcttcaggacagactgcagtatcctaactcccagcacaagcgttacaccgttaaggatggggcgccagcactgattccttcagatcccattgcgctaatgaaaagcactgttctttctacgaaatcaaagttcaagttatttctggaaccatttctctatgaaaaatctagcacaaggaactccaaaaaagtgtctgacgagcatttgcgcgagagcgttgggagtttttttgaacgccattttgggaaagaggttgttgactatcttattgatccatttgtagctggaacaagtgcaggagatcccgagtcattatctattcgtcatgcatttccggggttatggaatttagaaaaaaagtatggttctctcatcgttggtgccatcttgtcaaaactaacagctaaaggtggttcagcaaagaaaggaggcgcttcgtcaggaaaaggaaggaacaagcgggcctcattttcatttcatggtggcatgcagacactagtagacgcacttcacaaggaagttggagatactaatgtgaagcttggaacacaagtattgtcattggcgtgtaactgtgatggactctctgcatcagatgggtggtcaatttttgttgattcaaaggatgctagtagtaaggagcttgcaaggaaccaatcctttgatgctgttataatgacagctccactgtccaatgtccagaggatgaagttcacaaaaggcggacgtccctttgtgctagactttcttcctaaggtggattatctgccgttgtccctcatggtaacagcatttaagaaggaagacgtcaaaagacccctcgaaggatttggggtcttaataccctttaaggaacaacaaaaacatggtttgaaaacgctcggaactctcttctcctctatgatgttcccagatcgagctcctaatgaccagcacttgtttacaacattcattgggggaagccacaatagagatctcgctggagctccaacggctatcttgaaacaatttgtgacatctgaccttacaaagctactgggggtagaggggcagccaacttttgtgaaacatatacattggagaaatgcttttcctttgtatggccatgattatgatttggcactggaagctataggaaagatggaaggtgatctcccagggttcttctatgcaggaaataacaaggatgggttggctgttggaaatgtcatagcttcaggaagtaacactgcagaccttgtgatctcataccttgagtcaggcatcaagcatgttaattga

SEQ ID NO: 124 - DNA, 1593 bp, Triticum aestivum
atggccggcgcaacaatggccaccgccaccgtcgcggccgcgtcgccgctccgcggcagggtcaccgggcgcccacaccgcgtccgcccgcgttgcgctaccgcgagcagcgcgaccgagactccggcggcgcccggcgtgcggctgtccgcggaatgcgtcattgtgggcgccggcatcagcggcctctgcaccgcgcaggcgctggccacccgatacggcgtcagcgacctgctcgtcacggaggcccgcgaccgcccgggcggcaacatcaccaccgtcgagcgtcccgacgaggggtacctgtgggaggagggacccaacagcttccagccctccgacccggtcctcaccatggccgtggacagcgggctcaaggatgacttggtgttcggggaccccaacgcgccccggttcgtgctgtgggaggggaagctgaggccggtgccgtcgaagccaggcgacctgcctttcttcagcctcatgagtatccctgggaagctcagggccggccttggcgcgctcggcattcgcccacctcctccagggcgcgaggagtcggtggaggagtttgtgcgccgcaacctcggtgccgaggtctttgagcgcctcatcgagcctttctgctcaggtgtatatgctggtgatccttcgaagcttagtatgaaggctgcatttgggaaggtctggaggttggaggagattggaggtagtattattggtggaaccatcaaggcgattcaggataaagggaagaaccccaaaccgccaagggatccccgacttccggcaccaaagggacagacggtggcatctttcaggaagggtctagccatgctcccgaatgccatcgcatctaggctgggtagtaaagtcaagctgtcatggaagcttacgagcattacaaaggcggacaaccaaggatatgtattaggttatgaaacaccagaaggacttgtttcagtgcaggctaaaagtgttatcatgaccatcccgtcatatgttgctagtgatatcttgcgcccactttcaattgatgcagcagatgcactctcaaaattctattatccgccagttgctgctgtaactgtttcatatccaaaagaagctattagaaaagaatgcttaattgatggggagctccagggtttcggccagttgcatccacgtagccaaggagtcgagactttagggacaatatatagctcttctctctttcctaatcgtgctcctgctggaagagtgttacttctgaactatatcgggggttctacaaatacagggatcgtctccaagactgagagtgacttagtaggagccgttgaccgtgacctcagaaaaatgttgataaaccctagagcagcagaccctttagcattaggggttcgagtgtggccacaagcaataccacagtttttgattgggcaccttgatcgccttgctgctgcaaaatctgcactgggccaaggcggctacgacgggttgttcctaggaggaaactacgtcgcaggagttgccttgggccgatgcatcgagggtgcgtacgagagtgcctcacaagtatctgacttcttgaccaagtatgcctacaag

SEQ ID NO: 125 - DNA, 1506 bp, Solanum lycopersicum
atggctccatctgccggagaagataaacaaaagagagttgcagtcattggtgctggcgtcagtggacttgctgcagcatacaagttgaaagttcatggcttgaatgtcacagtatttgaagcagaagggagagctggagggaagttacgaagcctgagtcaagatggcctaatatgggatgaaggcgcaaatactatgactgaaagtgaaggtgatgtcacatttttgcttgattcgcttggactccgagaaaaacaacaattcccactttcacagaacaagcgctacattgccagaaatggtactcctactctgataccttcaaatccatttgacctattcaaaagcaattttctttccactggatcaaagcttcagatgcttttcgagccacttttgtggaagaataaaaagcttacaaaggtgtctgacaaacacgaaagtgtcagtggattcttccagcgtcattttggaaaggaggttgtcgactatctaattgacccttttgttgctggaacatgtggtggtgatcctgattcgctttcaatgcacctttcatttccagacttgtggaatttagagaaaaggtttggttcagtcatagttggggcaattcaatctaagttatctcctataaaggaaaagaaacaagggccacccagaacttcaataaataagaagcgccagcgggggtccttttcatttttgggcggaatgcaaacacttactgacgcaatatgcaaaaatctcaaagaagatgaacttaggctaaactctagagttctggaattatcttgtagctgtagtggggactctgcgatagatagctggtcaattttttctgcctctccacacaagcggcaagcagaagaagaatcatttgatgctgtaattatgacggcccctctctgtgacgttaagagtatgaagattgctaagagaggaaatccatttctgctcaactttattcctgaggtcgattatgtaccactatctgttgttataaccacatttaagaaggagagtgtaaagcatccccttgagggttttggagtgcttgtaccctcccaggagcaaaaacatggtctgaagacactaggcaccctcttctcttctatgatgtttccagatcgtgcacccaacaatgtctatctctatactacatttgttggtggaagccgaaatagagaactcgcgaaagcctcgaggactgagctgaaagagatagtaacttctgaccttaagcagttgttgggtgctgagggagagccaacatatgtgaatcatttatgctggagtaaagcatttccattgtacgggcataactatgattcagtcctagacgcaattgacaaaatggagaaaagccttcctggattattctatgcaggtaaccacaaggggggattgtcagttggcaaagcattatcttctggatgcaatgcagcagatcttgttatatcatatcttgaagcggtttcagctgacaccaaaaaccatagctga

SEQ ID NO: 126 - DNA, 1677 bp, Solanum lycopersicum
atgacaacaacggccgtcgtcaaccatcctagcattttcactcaccggtcgccgctgccgtcgccgtcctcctcctcatcctcatcgccgtcatttttatttttaaatcgtacgaattttattccatacttttccacctccaagcgcagtagtgtcaattgcaatggctggagaacacggtgttccgttgcgaagaattatacagttcctccctcagaagttgacggtaatcagttaccggagctggattgtgtggtagtcggagcaggaattagtggtctctgcattgctaaggtgatatcggctaattatcccaatttgatggtgacggaggcgagggatcgtgccggtggaaacataacgacggtggaaagagatggatacttatgggaagaaggtcctaacagtttccagccttcggatcctatgttgactatggctgtagattgtggattgaaggatgatttggtgttgggagatcctgatgcgcctcgctttgtcttgtggaaggataaactaaggcctgttcccggcaagctcactgatcttcccttctttgatttgatgagtattcctggcaagctcagagctggttttggtgccattggccttcgcccttcacctccaggttatgaggaatcagttgagcagttcgtgcgtcgtaatcttggtgctgaagtctttgaacgtttgattgaaccattttgttctggtgtttatgctggcgacccatcaaaattgagtatgaaagcagcatttgggaaagtgtggaagctagaacaaactggtggtagcattattgggggaacctttaaggcaataaaggagagatccagtaaccctaaaccgcctcgtgatccgcgtttaccaacaccaaaaggacaaactgttggttcatttaggaagggtctgagaatgctgccagatgcaatttgtgaaagactgggaagcaaagtgaaactatcatggaagctttctagcattacaaagtcagataaaggaggatatctcttgacatacgagacaccagaaggagtagtttctctgcgaagtcgaagcattgtcatgactgttccatcctatgtagcaagcaacatattacgccctctttcggtcgccgcagcagatgcactttcaagtttctactatcccccagttgcagcagtgacaatttcatatcctcaagaggctattcgtgatgagcgtctggttgatggtgaactaaagggatttgggcagttgcatccacgttcacagggagtggaaacactaggaacaatatatagttcatcactcttccctaaccgtgctccaaatggccgggtgctactcttgaactacattggaggagcaacaaatactgaaattgtgtctaagacagagagccaacttgtggaagcagttgaccgtgacctcagaaagatgcttataaaacccaaagcacaagatccctttgttacgggtgtgcgagtatggccacaagctatcccacagtttttggtcggacatctggatacactaggtactgctaaagctgctctaagtgataatgggcttgacgggctattccttgggggtaattatgtgtctggtgtagcattgggaaggtgtgttgaaggtgcttatgaaattgcatctgaagtaactgggtttctgtctcagtatgcatacaaatga

SEQ ID NO: 127 - DNA, 1620 bp, Gossypium hirsutum
atgacggctctaatcgacctttctcttctccgctcctcgccctccgtttcccctttctccataccccaccaccagcttccgccccgctctcgtaaacctttcaagctccgatgctccctcgccgagggtcccacgatttcctcatctaaaatcgacgggggagaatcatccatcgcggattgcgtcgtcgttggaggtggtatcagtggactttgcattgctcaagctctcgccaccaagcaccgtgacgtcgcttccaatgtgattgtgacggaagccagagaccgtgttggtggcaacatcactaccgttgagagagatggatatctgtgggaagaaggacccaacagttttcagccctccgatcctattctaaccatggccgtggatagtggattgaaggacgatttagttttaggtgaccctaatgcaccgcgatttgtactgtgggagggaaaactaaggcctgtgccctccaagccaaccgacttgccgttttttgacttgatgagcattgctggaaaacttagggctgggttcggggctattggcattcggcctccccctccgggttatgaagaatcggtggaggagtttgtgcgccgtaatcttggtgctgaggtttttgaacgctttattgaaccattttgttcaggtgtttatgcaggggatccttcaaaattaagcatgaaagcagcatttggaagagtatggaagctagaagagattggtggcagcatcattggtggcactttcaagacaatccaggagagaaataagacacctaagccacccagagacccgcgtctgccaaaaccgaagggccaaacagttggatcttttaggaagggacttaccatgctgcctgaggcaattgctaacagtttgggtagcaatgtaaaattatcttggaagctctccagtattaccaaattgggtaatggagggtataacttgacatttgaaacacctgaaggaatggtatctcttcagagtagaagtgttgtcatgaccattccatcccatgttgccagtaacttgttgcatcctctctcggctgctgctgcagatgcattatcccaattttattatcctccagttgcatcagtcacagtctcctatccaaaagaagccattcgaaaagaatgtttgattgatggtgaacttaaggggtttggccagttgcacccacgcagccaaggaatcgaaactttagggacgatatacagttcatcacttttccccaatcgagctccatctggcagggtgttgctcttgaactacataggaggagctaccaacactggaattttgtccaagactgaaggggaacttgtagaagcagttgatcgtgatttgagaaaaatgcttataaatcctaatgcaaaggatcctcttgttttgggtgtaagagtatggccaaaagccattccacagttcttggttggtcatctggatctccttgatactgcaaaaatggctctcagggattctgggtttcatggactgtttcttgggggcaactatgtatctggtgtggcattaggacggtgtgtggaaggtgcttacgaggttgcagctgaagtgaaggaattcctgtcacaatatgcatacaaataa

SEQ ID NO: 128 - DNA, 1683 bp, Beta vulgaris
atgaaatcaatggcgttatcaaactgcattccacagacacagtgcatgccattgcacagcagcgggcattacaggggcaattgtatcatgttgtcaattccatgtagtttaattggaagacgaggttattattcacataagaagaggaggatgagcatgagttgcagcacaagctcaggctcaaagtcagcggttaaagaagcaggatcaggatcaggatcaggagcaggaggattgctagactgcgtaatcgttggaggtggaattagcgggctttgcatcgcgcaggctctttgtacaaaacagtcctctttatccccaaattttatagtgacagaggccaaagacagagttggcggcaacatcgtcactgtggaggccgatggctatatctgggaggagggacccaatagcttccagccttccgacgcggtgctcaccatggcggtcgacagtggcttgaaagatgagttggtgctcggagatcccaatgctcctcgctttgtgctgtggaatgacaaattaaggcccgtaccttccagtctcaccgacctccctttcttcgacctcatgaccattcccggcaagattagggctgctcttggtgctctcggatttcgcccttctcctccacctcatgaggaatctgttgaacactttgtgcgtcgtaatctcggagatgaggtctttgaacgcttgattgaacccttttgttcaggtgtgtatgccggtgatcctgccaagctgagtatgaaagctgcttttgggaaggtctggaagttggagcaaaagggtggcagcataattggtggcactctcaaagctatacaggaaagagggagtaatcctaagccgccccgtgaccagcgcctccctaaaccaaagggtcagactgttggatcctttagaaagggactcgttatgttgcctaccgccatttctgctcgacttggcagtagagtgaaactatcttggaccctttctagtatcgtaaagtcactcaatggagaatatagtctgacttatgataccccagatggcttggtttctgtaagaaccaaaagtgttgtgatgactgtcccatcatatgttgcaagtaggcttcttcgtccactttcagactctgctgcagattctctttcaaaattttactatccaccagttgcagcagtgtcactttcctatcctaaagaagcgatcagatcagaatgcttgattaatggtgaacttcaaggtttcgggcaactacatccccgcagtcagggtgtggaaaccttgggaacaatttatagttcgtctcttttccctggtcgagcaccacctggtaggatcttgatcttgagctacatcggaggtgctaaaaatcctggcatattaaacaagtcgaaagatgaacttgccgagacagttgacaaggacctgagaagaatgcttataaatcctgatgcaaaacttcctcgtgtactgggtgtgagagtatggcctcaagcaataccccagttttctattgggcactttgatctgctcgatgctgcaaaagctgctctgacagatacaggggtcaaaggactgtttcttggtggcaactatgtttcaggtgttgccttggggcggtgtatagagggtgcttatgagtctgcagctgaggtagtagatttcctctcacagtactcagacaaatag

SEQ ID NO: 129 - protein, 98 aa, Amaranthus
MVIQSITHLSPNLALPSPLSVSTKNYPVAVMGNISEREEPTSAKRVAVVGAGVSGLAAAYKLKSHGLSVTLFEADSRAGGKLKTVKKDGFIWDEGANT

SEQ ID NO: 130 - protein, 98 aa, Amaranthus
MVIQSITHLSPNLALPSPLSVSTKNYPVAVMGNISEREEPTSAKRVAVVGAGVSGLAAAYKLKSHGLSVTLFEANSRAGGKLKTVKKDGFIWDEGANT

SEQ ID NO: 131 - protein, 98 aa, Amaranthus
MVIQSITHLSPKLALPSPLSVSTKNYPVAVMGNISEREEPTSAKRVAVVGAGVSGLAAAYKLKSHGLNVTLFEADSRAGGKLKTVKKDGFIWDEGANT

SEQ ID NO: 132 - protein, 98 aa, Amaranthus; identical to SEQ ID NO: 131

SEQ ID NO: 133 - protein, 113 aa, Echinochloa
MLTLLFGVTSAGRATMVIQSTTHLSPNLALPSPLSVSTKNYPVAVMGNISEREEPTSAKRVAVVGAGVSGLAAAYKLKSHGLSVTLFEADSRAGGKLKTVKKDGFIWDEGANT

SEQ ID NO: 134 - protein, 97 aa, Spinacia oleracea
MVILPVSQLSTNLGLSLVSPTKNNPVMGNVSERNQVNQPISAKRVAVVGAGVSGLAAAYKLKSNGLNVTLFEADSRAGGKLKTVVKDGLIWDEGANT

SEQ ID NO: 135 - protein, 96 aa, Beta vulgaris subsp. vulgaris
MVMLYDSHLSGVSTHLQLSQAFPRKNPLMAKVSEPGKPTSAKRIAVVGAGVSGLAAAYKLKSHGLSVTLFEADTRAGGKLKTVAKDGLIWDEGANT

SEQ ID NO: 136 - protein, 94 aa, Solanum tuberosum
MAPSAGEDKQSNLLYPHVSLHNSTISQAKLTQFFCVDCPKRVAVIGAGVSGLAAAYKLKIHGLDVTVFEAEGRAGGKLRSLSQDGLIWDEGANT

SEQ ID NO: 137 - protein, 88 aa, Gossypium
MLNIAPSCVLASGISKPVTKMASTENKDDHSSAKRVAVIGAGVSGLAAAYKLKSQGLHVTVFESEGRAGGKLRSVSREGLIWDEGANT

SEQ ID NO: 138 - protein, 122 aa, Eucalyptus
MTGSTICSWKTRTVDGPNPELWSARRRRPPLSSLSISIGKPEQRGAHGQQRHAKMSSAAGADISSKTLHALSSSQLTYGLAAAHKLKSNGVDVTVYEAEGRIGGKLRSVSQGGLIWDEGANT

SEQ ID NO: 139 - protein, 72 aa, Coffea
MASPAPKEKDKSSTCTKKRVAVVGAGVSGLAAAYKLKLRGLNVTVFEADERAGGKLKSVSRDGLIWDEGANT

SEQ ID NO: 140 - protein, 71 aa, Arabidopsis thaliana
MASGAVADHQIEAVSGKRVAVVGAGVSGLAAAYKLKSRGLNVTVFEADGRVGGKLRSVMQNGLIWDEGANT

SEQ ID NO: 141 - protein, 68 aa, Helianthus annuus
MASPTTPDNQKPAKRVAVVGAGVSGCAAAYKLKLHGLNVTVFEADGRVGGKLRSVSQDGLIWDEGANT

SEQ ID NO: 142 - protein, 73 aa, Arabidopsis lyrata
MESGAVGDHDTKFESISGKRVAVVGAGVSGLAAAYKLKSRGLNVTVFEADERAGGKLTSVMQNGLIWDQGANT

SEQ ID NO: 143 - protein, 99 aa, Erythranthe
MRLYSAQYCCPSLLLLSSPSPYPFPITRSTVLSMASAAQQDSAVKSVAVIGAGVSGLSAAYKLKLHGLNVTVFEADARSGGKLRSISHDGLIWDEGANT

SEQ ID NO: 144 - protein, 69 aa, Brassica oleracea
MASNAAADHDKLSGKRVAVVGAGVSGLAAAYKLKSKGVNVTLFEADGRVGGKLRSVMHNGLIWDEGANT

SEQ ID NO: 145 - protein, 68 aa, Ambrosia artemisiifolia
MASPTIVDNQKPAKRVAIVGAGVSGCAAAYKLKLHGLNVTVFEADERVGGKPRSVSQDGLIWDEGANT

SEQ ID NO: 146 - protein, 71 aa, Morus notabilis
MGTSASKQDNPTSPVKSVAVIGAGVSGLAAAYKLKSHGLNVTVFEAEERAGGKLRSVSSHHGLIWDEGANT

SEQ ID NO: 147 - protein, 63 aa, Cucumis sativus
MKSSQSSRKKVAVVGAGVSGLAAAYKLKSHGFDVTVLEADERVGGKLRSVSYKGLIWDEGANT

SEQ ID NO: 148 - protein, 72 aa, Zostera marina
MSLPAMSEISCISTGPAHSVAVVGGGISGLAAAYKLKSNGLSVTVFETEERPGGKIRSRSQDGFIWDEGANT

SEQ ID NO: 149 - protein, 77 aa, Chondrus crispus
MAVAEGATPAPAAASATPSEVDALVIGSGISGSSLAFTLSQASPATSLLLTEARPVVGGNVISRNERGYTWEEGPNT

SEQ ID NO: 150 - protein, 66 aa, Chondrus crispus
MPEPVKRNVAVLGGGPAGLSAAFRLLHDLPPGLSVKVDLYEATGRLGGAVTSACDAGFCYELGPNS

SEQ ID NO: 151 - protein, 109 aa, Oryza nivara
MLSPATTFSSSSSSSSPSRAHARAPTRFAVVASARAARFRPARAMAASDDPRGGRSVAVVGAGVSGLAAAYRLRKRGVQVTVFEAADRAGGKIRTNSEGGFIWDEGANT

SEQ ID NO: 152 - protein, 108 aa, Oryza glumipatula
MLSPATTFSSSSSSSPSRAHAHAPTRFAVAASARAARFRPARAMAASDDPRGGRSVAVVGAGVSGLAAAYRLRKRGVQVTVFEAADRAGGKIRTNSEGGFIWDEGANT

SEQ ID NO: 153 - protein, 65 aa, Oryza
MAASDDPRGGRSVAVVGAGVSGLAAAYRLRKRGVQVTVFEAADRAGGKIRTNSEGGFIWDEGANT

SEQ ID NO: 154 - protein, 109 aa, Oryza sativa
MLSPATTFSSSSSSSSPSRAHARAPTRFAVAASARAARFRPARAMAASDDPRGGRSVAVVGAGVSGLAAAYRLRKRGVQVTVFEAADRAGGKIRTNSEGGFIWDEGANT

SEQ ID NO: 155 - protein, 114 aa, Oryza sativa
MAAAAAAMATATSATAAPPLRIRDAARRTRRRGHVRCAVASGAAEAPAAPGARVSADCVVVGGGISGLCTAQALATKHGVGDVLVTEARARPGGNITTAERAGEGYLWEEGPNS

SEQ ID NO: 156 - protein, 110 aa, Oryza punctata
MLSPATTTTFSSSSSSSSSSSRAHAPTRFAAAASARAARFRPARAMAASDDPHGGRSVAVVGAGVSGLAAAYRLRKRGVQVTVFEAADRAGGKIRTNSEGGFIWDEGANT

SEQ ID NO: 157 - protein, 108 aa, Oryza rufipogon
MLSPATTFSSSSSSSPSRAHARAPTRFAVAASARAARFRPARAMAASDDPRGGRSVAVVGAGVSGLAAAYRLRKRGVQVTVFEAADRAGGKIRTNSEGGFIWDEGANT

SEQ ID NO: 158 - protein, 113 aa, Oryza meridionalis
MLSPATATTTTTTTFSSSSSPSRAHAHASTRFAVAASARAARFRPARAMAASNDPRGGRSVAVVGAGVSGLAAAYRLRKRGVQVTVFEAADRAGGKIRTNSEGGFIWDEGANT

SEQ ID NO: 159 - protein, 100 aa, Zea mays
MLALTASASSASSHPYRHASAHTRRPRLRAVLAMAGSDDPRAAPARSVAVVGAGVSGLAAAYRLRQSGVNVTVFEAADRAGGKIRTNSEGGFVWDEGANT

SEQ ID NO: 160 - protein, 109 aa, Oryza brachyantha
MLSPAATTTTTTSYCSYSSRAHAPTRSASAGAARFRPARAMATSDNDPRGAAPARSVAVVGAGVSGLAAAYKLRKRGVQVTVFEAADRAGGKIRTNSESGFIWDEGANT

SEQ ID NO: 161 - protein, 131 aa, Musa acuminata
MLKQHGSATNRGLLSKIWFARRFGEPVCRDPILLFRLPLDLGRSRRRRCSRKPSCFGEFHRQLAIAMASADNHNSIKSVAVVGGGVSGLAAAYKLKSNGLKVTLFEAEERAGGKIKSSSENGLIWDEGANT

SEQ ID NO: 162 - protein, 70 aa, Populus trichocarpa
MTAAAKDDDFGSKQSKNVAVIGAGVSGLAAAYKLKSNGVKVTVFEAEGRAGGKLRSVSHHDLVWDEGANT

SEQ ID NO: 163 - protein, 108 aa, Avena fatua
MLASATTPSPSSSRASTLFASSSRPRHTASARGRRLRPVLAMAASDDPRAAPARSVAVVGAGVSGLVAAYRLRKSGVRVTVFEADDRAGGKIRTNSDSGFLWDEGANT

SEQ ID NO: 164 - protein, 98 aa, Setaria italica
MLSSSTTTASPASSHPYRPAYPRASLRPVLAMAGSDDPRAAPARSVAVIGAGVSGLAAAYRLRKSGVNVTVFEAADRAGGKIRTNSEAGFLWDEGANT

SEQ ID NO: 165 - protein, 108 aa, Poa annua
MLTSATTPSSSSSASSRACARFASSARPHHTASARGRRLRPVLAMAASDQPRARSVAVVGAGVSGLVAAYRLRKSGVRVTVFEADDRAGGKIRTNSDSGFLWDEGANT

SEQ ID NO: 166 - protein, 100 aa, Sorghum bicolor
MLARTATVSSTSSHSHPYRPTSARSLRLRPVLAMAGSDDSRAAPARSVAVVGAGVSGLVAAYRLRKSGVNVTVFEAADRAGGKIRTNSEGGFLWDEGANT

SEQ ID NO: 167 - protein, 104 aa, Brachypodium distachyon
MLTSATASPSASTRFSSTCRPCRSDSVPARRPRPVLAMAASDDPRAAPARSVAVVGAGVSGLVAAHRLRKSGVRVTVFEADDRAGGKIRTNSDSGFLWDEGANT

SEQ ID NO: 168 - protein, 107 aa, Alopecurus myosuroides
MLTSATTPSSSSASSRASTRFASSSRPRRTASARGRRLRPVLAMAASDDPRARSVAVVGAGVSGLVAAYRLSKSGVRVTVFEADDRAGGKIRTNSDSGFLWDEGANT

SEQ ID NO: 169 - protein, 68 aa, Gossypium raimondii
MASTENKDDHSSAKRVAVIGAGVSGLAAAYKLKSQGLHVTVFESEGRAGGKLRSVSREGLIWDEGANT

SEQ ID NO: 170 - protein, 68 aa, Amaranthus tuberculatus
MGNISERDEPTSAKRVAVVGAGVSGLAAAYKLKSHGLNVTLFEADSRAGGKLKTVKKDGFIWDEGANT

SEQ ID NO: 171 - protein, 68 aa, Amaranthus tuberculatus; identical to SEQ ID NO: 170

SEQ ID NO: 172 - protein, 70 aa, Brassica rapa
MASNAVADHDKPVSGKRVAVVGAGVSGLAAAYKLKSKGVNVTVFEADGRVGGKLRSVMHNGLIWDEGANT

SEQ ID NO: 173 - protein, 70 aa, Jatropha curcas
MASAPKDERRNPSSGKRVAVVGAGVSGLAAAYKLKSHGLKVTVFEAEGRAGGKLRSVSRDGLIWDEGANT

SEQ ID NO: 174 - protein, 70 aa, Vitis vinifera
MAEKSDAQSHYNGSGKRVAVVGAGVSGLAAAYKLKLHGVNITLYEAEERAGGKLRSVSQHGLVWDEGANT

SEQ ID NO: 175 - protein, 69 aa, Vitis vinifera
MAEKSDAQSHYNGSGKRVAVVGAGVSGLAAAYKLKLHGVNTLYEAEERAGGKLRSVSQHGLVWDEGANT

SEQ ID NO: 176 - protein, 69 aa, Ricinus communis
MSSVIKEDRNPSHVKRVAVVGAGVSGLAAAYKLKSHGLKVTVFEAEERAGGKLRSVNHDGLIWDEGANT

SEQ ID NO: 177 - protein, 65 aa, Solanum lycopersicum
MAPSAGEDKQKRVAVIGAGVSGLAAAYKLKVHGLNVTVFEAEGRAGGKLRSLSQDGLIWDEGANT

SEQ ID NO: 178 - protein, 64 aa, Kochia
MADLSETSVKRVAVVGAGVSGLAAAYKLKSHGFNVTLFEAEPRAGGKIKTVAKDGLIWDEGANT

SEQ ID NO: 179 - protein, 66 aa, Prunus persica
MTSLTTKEGSVKRVAVVGAGVSGLAAAYKLKSHGFDVTVFEAEGRAGGKLRSVSHDGLIWDEGANT

SEQ ID NO: 180 - protein, 68 aa, Theobroma cacao
MAAAKNKDKQTSAKRVAVVGAGVSGLAAAYKLKSHGLNVTMFEAEGRAGGKLRSVSQEGLIWDEGANT

SEQ ID NO: 181 - protein, 68 aa, Glycine max
MASSATDDNPRSVKRVAVVGAGVSGLAAAYKLKSHGLDVTVFEAEGRAGGRLRSVSQDGLIWDEGANT

SEQ ID NO: 182 - protein, 68 aa, Citrus clementina
MASAPGEDNQRSAKRVAVVGAGVSGLAAAYKLKSNGVNVMVFEADERAGGKLRSISKDGLIWDEGANT

SEQ ID NO: 183 - protein, 68 aa, Citrus clementina
MTNKWRVDFSGSAKRVAVVGAGVSGLAAAYKLKSNGVNVMVFEADERAGGKLRSISKDGLIWDEGANT

SEQ ID NO: 184 - protein, 68 aa, Medicago truncatula
MASSAKDDNPRSVKRVAVVGAGVSGLAAAYKLKSHGLDVTVFEAEGRAGGRLRTVSRDGLVWDEGANT

SEQ ID NO: 185 - protein, 68 aa, Phaseolus vulgaris
MSSSATDDNPRSVKRVAVIGAGVSGLAAAYKLKSHGLDVTVFEAEGRAGGRLRSVSRDGLIWDEGANT

SEQ ID NO: 186 - protein, 68 aa, Vigna angularis
MSSSATDDNPRSVKRVAVIGAGVSGLAAAYKLKSHGVDVTVFEAEGRAGGRLRSVSRDGLIWDEGANT

SEQ ID NO: 187 - protein, 68 aa, Gossypium arboreum
MASTENKDDHSSAKRVAVIGAGVSGLAAAYKLKSQGLHVTVFESEGRAGGKLRSVSRDGLIWDEGANT

SEQ ID NO: 188 - protein, 68 aa, Nicotiana tabacum
MAPSAGEDKHSSAKRVAVIGAGVSGLAAAYKLKIHGLNVTVFEAEGKAGGKLRSVSQDGLIWDEGANT

SEQ ID NO: 189 - protein, 68 aa, Ambrosia artemisiifolia
MASPTIVDNQKPAKRVAIVGAGVSGCAAAYKLKLHGLNVTVFEADGRVGGKLRSVSQDGLIWDEGANT

SEQ ID NO: 190 - protein, 68 aa, Solanum tuberosum
MAPSAGEDKQNCPKRVAVIGAGVSGLAAAYKLKIHGLNVTVFEAEGRAGGKLRSLSQDGLIWDEGANT

SEQ ID NO: 191 - protein, 68 aa, Solanum tuberosum
MAPSAGEDKQNCPKRVAVIGAGVSGLAAAYKLKIHGLDVTVFEAEGRAGGKLRSLSQDGLIWDEGANT

SEQ ID NO: 192 - protein, 69 aa, Brassica napus
MASNAAADHDKLSGKRVAVVGAGVSGLAAAYKLKSKGVNVTVFEADGRVGGKLRSVIRNGLIWDEGANT

SEQ ID NO: 193 - protein, 69 aa, Brassica napus
MASNAVADHDKLSGKRVAVVGAGVSGLAAAYKLKSKGVNVTVFEADGRVGGKLRSVMHNGLIWDEGANT

SEQ ID NO: 194 - protein, 70 aa, Picea sitchensis
MAEHIHTDQNDKRPLKSVAVVGAGISGLAAAYRLKSQGLAVTIFEADGTTGGKIKSFAQNGLIWEKGANT

SEQ ID NO: 195 - protein, 67 aa, Brachypodium distachyon
MAASDDPRAAPARSVAVVGAGVSGLVAAHRLRKSGVRVTVFEADDRAGGKIRTNSDSGFLWDEGANT

SEQ ID NO: 196 - protein, 64 aa, Triticum aestivum
MAASDDPRARSVAVVGAGVSGLVAAYRLRKSGVRVTVFEAEDRAGGKIRTNSDGGFLWDEGANT

SEQ ID NO: 197 - protein, 65 aa, Oryza glaberrima; identical to SEQ ID NO: 153

SEQ ID NO: 198 - protein, 67 aa, Selaginella moellendorffii
MAMAEGETAPVLGSVAVVGAGASGLAAAYRLRAAGVSVTVYEAENSIGGKLKSVSENGFIWEKGPNT

SEQ ID NO: 199 - protein, 67 aa, Selaginella moellendorffii
MAMAEGETVPVLGSVAVVGAGASGLAAAYRLRAAGVSVTVYEAENSIGGKLKSVSENGFIWEKGPNT

SEQ ID NO: 200 - protein, 97 aa, Triticum aestivum
MLTSATAPSSSCSSHAPTRFASARGRRLRPVLAMAASDDPRARSVAVIGAGVSGLVAAYRLRKSGVRVTVFEAEDRAGGKIRTNSDGGFLWDEGANT

SEQ ID NO: 201 - protein, 112 aa, Hordeum vulgare
MLTSATAPPSSSSCSSHAPARFASPSRPRRSASASARGRGRRVRPVLAMAASDDPRARSVAVVGAGVSGLVAAYMLRKSGVRVTVFEAEDRAGGKIRTNSDGGFLWDEGANT

SEQ ID NO: 202 - protein, 70 aa, Ginkgo
MAAPLHPDNNSRRPHKSVAIVGAGISGLAAAYRLKSEGLAVTVFEAEESTGGKIKSISQDGLVWEKGPNT

SEQ ID NO: 203 - protein, 65 aa, Phytophthora capsici
MAARDVVVLGGGISGLTLAYFLRQALPKAAADATRIRVLDASAISGGWVHTAKREGFLFEEGPRG

SEQ ID NO: 204 - protein, 76 aa, Lemna
MEADAGKGSAGGAQILSHDSVRSVAVIGGGISGLAAAYKLKSNGFRAVVFEAEGKAGGKIRSGSQEGLIWDEGANT

SEQ ID NO: 205 - protein, 135 aa, Capsella rubella
MHDAGDSHDPFEIHKHVDVELKSGLDAKTLNKGPLDKRLKIIGPEELKTRFDAELSWLLLITMASAKVADNDTKFEAVSGRRVAVVGGGVSGLAAAYKLKSKGLNVTVFEADGRAGGKLRSVMHNGLIWDEGANT

SEQ ID NO: 206 - protein, 66 aa, Eutrema salsugineum
MAPDAVADHDKKFEALSGKRVAVVGAGVRLKSRGLNVTVFEADGRAGGKLRSVMHKGLIWDEGANT

SEQ ID NO: 207 - protein, 121 aa, Glycine max
MVSVFNEILFPPNQTLLRPSLHSPTSFFTSPTRKFPRSRPNPILRCSIAEESTASPPKTRDSAPVDCVVVGGGVSGLCIAQALATKHANANVVVTEARDRVGGNITTMERDGYLWEEGPNS

SEQ ID NO: 208 - protein, 117 aa, Gossypium raimondii
MTALIDLSLLRSSPSVSPFSIPHHQHPPRFRKPFKLRCSLAEGPTISSSKIDGGESSIADCVIVGGGISGLCIAQALATKHRDVASNVIVTEARDRVGGNITTVERDGYLWEEGPNS

SEQ ID NO: 209 - protein, 115 aa, Brassica napus
MDLSLLRPQPFLSPFSNPFPRSRPYKPLNLRCSVSGGSVVVGSSTIEGGGGGKTVAADCVIVGGGISGLCIAQALVTKHPDAAKSVMVTEAKDRVGGNIITREEQGFLWEEGPNS

SEQ ID NO: 210 - protein, 114 aa, Brassica napus
MDLSLLRPQPFLSPFSNPFPRSRPYKPLNLRCSVSGGSVVGSSTIEGGGGGKTVTADCVIVGGGISGLCIAQALVTKHPDAAKNVMVTEAKDRVGGNIITREEQGFLWEEGPNS

SEQ ID NO: 211 - protein, 62 aa, Bacteria <prokaryote>
MTRHVVILGGGVTGLAAAYRLRRTVPSPDDLAITLVERRSRLGGSIGTERHEGYLIESGVDS

SEQ ID NO: 212 - protein, 113 aa, Setaria italica
MVAAAMATAPSAGVPPLRGTRGPARFRIRGVSVRCAAVAGGAAEAPASAGARVSADCVVVGGGISGLCTAQALATKHGVGDVLVTEARARPGGNITTVERPDEGYLWEEGPNS

SEQ ID NO: 213 - protein, 115 aa, Zea mays
MVAATATATAMATAASPLLNGTRIPARLRHRGLSVRCAAVAGGAAEAPASTGARLSADCVVVGGGISGLCTAQALATRHGVGDVLVTEARARPGGNITTVERPEEGYLWEEGPNS

SEQ ID NO: 214 - protein, 109 aa, Triticum aestivum
MAGATMATATVAAASPLRGRVTGRPHRVRPRCATASSATETPAAPGVRLSAECVIVGAGISGLCTAQALATRYGVSDLLVTEARDRPGGNITTVERPDEGYLWEEGPNS

SEQ ID NO: 215 - protein, 109 aa, Brachypodium distachyon
MATATMATAAATAAPPRRLRVPAPPRGGHARCAVASNATEAPAAPGARLSADCVIVGGGISGLCTAQALATKYGFGDVLVTEARARPGGNITTVERPDEGYLWEEGPNS

SEQ ID NO: 216 - protein, 162 aa, Populus trichocarpa
MTVKQSSVARIKGLINPSSSQITSLQGSGSFACQTESEPAMTSTFTDLSLLRPTIPSLIPSSFSKFTTHRPLKLRCSLTEDSTTFIPFKLNGEAQSSAGHSATADCVIVGGGISGLCIAQALATKHWDVAPNVIVTEARDRVGGNITTLERDGYLWEEGPNS

SEQ ID NO: 217 - protein, 121 aa, Populus trichocarpa
MTTFIDFSLLRPTTPSLIPSSFSKFSTPRPFKLRCSLTEESATITPSKLNGEAQSNGGHSAAADCVIVGGGISGLCIAQALATKHRDVAPNVIVTEARDRVGGNITTLERDGYLWEEGPNS

SEQ ID NO: 218 - protein, 147 aa, Ginkgo
MAMAVEMEAVLTVALQNYPISPLKHFRGTHKKPATISSVFWQCKRNCLAGHAVWKGKTWIGGGVNVVAKEATMAPSGWVENENENDDMYDCVVVGGGISGLSTAQALVSKHSSTVKNVVLTEAKDRVGGNIMTMERDGYLWEEGPNS

SEQ ID NO: 219 - protein, 157 aa, Alopecurus myosuroides
MDFHTIRSPSLYPILVGHGKCKPTNQCSRSRIASSTPHRHLPRAQATEMVGATMAIATVTAALPLRVRVPGRSRRGQARCAVASDATEAPAAPSARLSADCVIVGGGISGLCTAQALATKYGVSDLLVTEARARPGGNITTVERPDEGYLWEEGPNS

SEQ ID NO: 220 - protein, 62 aa, Bacteria <prokaryote>
MKRVVVIGGGISGLSAAYFLKEAAAKKNIDLDYTLIEKSDRLGGNIITEKLDHFIVEGGPDN

SEQ ID NO: 221 - protein, 139 aa, Cyanidioschyzon merolae
MLRWSGSQQVTDRNRAEQHGLVVAFAFPARAPRHSEATHERWTGLAQRERGLCVPLKATKWKRDLWHSRKLQMQEPAQRNREQVQALVVGSGVTGSSFAFLLQHAGISDVICTEARGEVGGNLISRSKDGYLWEEGPNT

SEQ ID NO: 222 - protein, 128 aa, Amaranthus tuberculatus
MSAMALSSSILQCPPHSDISFRFFAHTRTQSPIFFGRPRKLSYIHCSTSSSSTANYQNTITSQGEGDKVLDCVIVGAGISGLCIAQALSTKHIQSNLNFIVTEAKHRVGGNITTMESDGYIWEEGPNS

SEQ ID NO: 223 - protein, 113 aa, Conyza canadensis
MTSLTNFTPLKLTNPNYLTTTTTYNHRKLSNFRFRCSIARDSPTAPSISGDSSSRPLLDCVVVGAGISGLCIAQALSTKHGGDVVVTEARERVGGNISTVERDGYLWEEGPNS

SEQ ID NO: 224 - protein, 121 aa, Lemna
MASSAAISPLHFSPAPPRRRELSHRCRVRCSIAGKPPATAANDSSATSVTGGEPVRRLRADCVIVGAGISGLCTAQALTVRPAAGRSSAPDVLVTEARDRVGGNITTVERDGYLWEEGPNS

SEQ ID NO: 225 - protein, 143 aa, Kochia
MSAMASPSIIPQSFLQRSPTSLQSRSNYSKNHIIISISTPCSHGKNQRRFLRKTTHFRSIHCSTISTSTPTSSSNPGTLGEGGLLDCVIVGGGISGLCIAQALSTKYSSLSTNFIVTEAKDRVGGNITTKEDDGYIWEEGPNS

SEQ ID NO: 226 - protein, 115 aa, Arabidopsis thaliana
MELSLLRPTTQSLLPSFSKPNLRLNVYKPLRLRCSVAGGPTVGSSKIEGGGGTTITTDCVIVGGGISGLCIAQALATKHPDAAPNLIVTEAKDRVGGNIITREENGFLWEEGPNS

SEQ ID NO: 227 - DNA, 639 bp, Artificial Sequence
  Expression cassette
atgactactgctgttactgctgctgtgtctttcccaagtaccaagaccacctctctcagtgctaggtctagttctgtgatctctcctgataagatctcttacaagaaggtgccactctactacagaaacgtgtcagctaccggaaagatgggacctatcagggctcaaatcgcttcttgctctagtatggatgctccttctgatgcattcctctgggtgaaggctctccacattatcgctgttgtttgctggttcgctgcactcttctacctccctagactctacgtgtaccacgctatgtctgaggatgatacctctcatagaaggttcgaggtgatggaaagaaagctctacaggggtatcatgtggccatctatgatcgctactctcatcaccgctcactttctcgtggattggggagatgctactagacactaccatgaggcactctggttctacatcaaggttggacttgttggactcctcgtgatctaccatttcgtgtgcggttactatagaaagaagctcatcggaaacgctcactacaagtctcacaagttttggagatacttcaacgagatgcctaccctcatcctcttcgctgtggttatcctcgttgtggtgaagcctcaattctga

SEQ ID NO: 228 - DNA, 747 bp, Artificial Sequence
  Expression Cassette
atggttattcagtctattacccacctctccccaaacctcgctttgccatctccactttctgtgtccaccaagaactacccagttgctgtgatgggcaacatctctgagagagaggaacctacctctgctaagagggttgcagttgttggagctggtgtttctggacttgctgctgcttacaagctcaagtcccacggactttcagtgacccttttcgaggctgattctagggctggtggaaagcttaagaccgtgaagaaggatggcttcatctgggatgagggtgctaacactatggatgccccatccgatgctttcttgtgggttaaggctctccacattatcgctgtggtttgctggttcgctgcactcttctaccttccaaggctttacgtgtaccacgccatgtctgaggatgacacctctcatagaaggttcgaggtgatggaacgtaagctctacaggggcattatgtggccatccatgattgccacccttattaccgctcacttcctcgtggattggggagatgctactaggcattaccatgaggccctctggttctacattaaggtgggattggtgggactcctcgtgatctaccatttcgtgtgcggctactaccgtaagaagctcattggaaacgcccactacaagagccacaagttttggagatacttcaacgagatgcccaccctgattcttttcgccgtggttattcttgtggtggtgaagccacagttctag

SEQ ID NO: 229 - DNA, 1086 bp, Artificial Sequence
  Expression cassette
atgactactgctgttactgctgctgtgtccttcccatctactaagaccaccagcctttccgccagatcctcctctgttatctccccagacaagatctcctacaagaaggtgcccctctactacagaaacgtgtcagctactggaaagatgggcccaatcagggctcagattgcttcctgctcatccatgaagccagatgctcatcaggtgaagcagttcttgcttaacctccaggataccatctgccagcagttgactgctgttgatggtgctgagttcgttgaggattcttggcaaagggaagctggtggtggtggaaggtctagagttcttagaaacggtggtgttttcgagcaggctggcgtgaacttctctcatgttcatggtgaagctatgccagcttctgctactgctcatagaccagagcttgccggaagatctttcgaggctatgggagtttctcttgtggtgcatccacacaacccatacgttccaacctctcacgcaaacgtgagattcttcattgctgagaagccaggcgctgatccagtttggtggttcggtggtggattcgatcttaccccattctacggcttcgaagaggatgctattcattggcataggaccgctagggatctttgccttccattcggagaggatgtgtaccccaggtacaagaagtggtgcgacgagtacttctacctcaagcacagaaacgagcagaggggaattggaggcctcttcttcgatgatctcaacaccccagatttcgaccgttgcttcgctttcatgcaggctgttggaaagggatacaccgatgcttacctccccatcgttgagagaagaaaggctatggcttacggcgagagagagaggaacttccaactttacagacgtggccgttacgttgagttcaaccttgtttgggatcgtggaacccttttcggacttcaaactggtggtaggaccgagtccatcctcatgtctatgccaccacttgttaggtgggagtacgactaccaacctaaggatggatctccagaggctgctctctccgagttcattaaggttagggattgggtgtga

SEQ ID NO: 230 - DNA, 1194 bp, Artificial Sequence
  Expression Cassette
atggttattcagtctattacccacctctccccaaacctcgctttgccatctccactttctgtgtccaccaagaactacccagttgctgtgatgggcaacatctctgagagagaggaacctacctctgctaagagggttgcagttgttggagctggtgtttctggacttgctgctgcttacaagctcaagtcccacggactttcagtgacccttttcgaggctgattctagggctggtggaaagcttaagaccgtgaagaaggatggcttcatctgggatgagggtgccaacactatgaagccagatgctcatcaggtgaagcagttcttgcttaacctccaggataccatctgccagcagcttactgctgttgatggtgctgagttcgttgaggattcttggcaaagggaagctggtggtggtggaaggtctagagttcttagaaacggtggtgttttcgagcaggctggcgtgaacttctctcatgttcatggtgaagctatgccagcttctgctactgctcatagaccagagcttgccggaagatcattcgaggctatgggagtttctcttgtggtgcatccacacaacccatacgttccaacctctcacgcaaacgtgagattcttcattgctgagaagccaggcgctgatccagtttggtggttcggtggtggattcgatcttaccccattctacggcttcgaagaggatgctattcattggcataggaccgctagggatctttgccttccattcggagaggatgtgtaccccaggtacaagaagtggtgcgacgagtacttctacctcaagcacagaaacgagcagaggggaattggaggcctcttcttcgatgatctcaacaccccagatttcgaccgttgcttcgctttcatgcaggctgttggaaagggatacaccgatgcttacctccccatcgttgagagaagaaaggctatggcttacggcgagcgtgagagaaacttccaactttacagacgtggccgttacgttgagttcaaccttgtttgggataggggaaccctcttcggacttcaaactggtggaagaaccgagtccatcctcatgtctatgccaccacttgttaggtgggagtacgactaccaacctaaggatggatctccagaggctgctctctccgagttcattaaggttagggattgggtgtga

SEQ ID NO: 231 - DNA, 999 bp, Artificial Sequence
  Expression Cassette
atggttattcagtctattacccacctctccccaaacctcgctttgccatctccactttctgtgtccaccaagaactacccagttgccgtgtgctcatccatgaagccagatgctcatcaggtgaagcagttcttgcttaacctccaggataccatctgccagcagcttactgctgttgatggtgctgagttcgttgaggattcttggcaaagggaagctggtggtggtggaaggtctagagttcttagaaacggtggtgttttcgagcaggctggcgtgaacttctctcatgttcatggtgaagctatgccagcttctgctactgctcatagaccagagcttgccggaagatctttcgaggctatgggagtttctcttgtggtgcatccacacaacccatacgttccaacctctcacgcaaacgtgagattcttcattgctgagaagccaggcgctgatccagtttggtggttcggtggtggattcgatcttaccccattctacggcttcgaagaggatgctattcattggcataggaccgctagggatctttgccttccattcggagaggatgtgtaccccaggtacaagaagtggtgcgacgagtacttctacctcaagcacagaaacgagcagaggggaattggaggcctcttcttcgatgatctcaacaccccagatttcgaccgttgcttcgctttcatgcaggctgttggaaagggatacaccgatgcttacctccccatcgttgagagaagaaaggctatggcttacggcgagagagagaggaacttccaactttacagacgtggccgttacgttgagttcaaccttgtttgggataggggaacccttttcggacttcaaactggtggtaggaccgagtccatcctcatgtctatgccaccacttgttaggtgggagtacgactaccaacctaaggatggatctccagaggctgctctctccgagttcattaaggttagggattgggtgtga

SEQ ID NO: 232 - DNA, 732 bp, Artificial Sequence
  Expression Cassette
atgactactgctgttactgctgctgtgtccttcccatctactaagaccaccagcctttccgccagatcctcctctgttatctccccagacaagatctcctacaagaaggtgcccctctactacagaaacgtgtcagctactggaaagatgggcccaatcagggctcagattgcttcctgctcatccatgaagaccctcatcttgttctccaccagggatggacagaccagagagatcgcttcttacctcgcctctgagcttaaagagcttggcattcaggctgacgttgcaaacgttcacaggatcgaagaaccacagtgggagaactacgatagggtggtgattggagcctccattaggtacggacattaccactctgccttccaagagttcgtgaagaagcacgctaccaggctcaactctatgccatccgctttctactccgtgaaccttgttgctaggaagccagagaagaggactccacagactaactcctacgcccgtaagttcctcatgaactctcaatggcgtccagataggtgcgctgttattgctggtgctttgagatacccaaggtacaggtggtacgaccgtttcatgatcaagctcattatgaagatgtccggcggagagactgacaccagaaaagaagttgtgtacaccgactgggagcaggttgcaaacttcgctagagagattgctcacctcaccgataagccaaccctcaagtaa

SEQ ID NO: 233 - DNA, 840 bp, Artificial Sequence
  Expression Cassette
atggttattcagtctattacccacctctccccaaacctcgctttgccatctccactttctgtgtccaccaagaactacccagttgctgtgatgggcaacatctctgagagagaggaacctacctctgctaagagggttgcagttgttggagctggtgtttctggacttgctgctgcttacaagctcaagtcccacggactttcagtgacccttttcgaggctgattctagggctggtggaaagcttaagaccgtgaagaaggatggcttcatctgggatgagggtgccaacactatgaagaccctgatcttgttctccaccagggatggacagaccagagagattgcttcctacctcgcctctgagcttaaagagcttggaatccaggctgacgttgcaaacgttcacaggattgaggaaccacagtgggagaactacgatagggttgtgatcggagcctccattaggtacggacattaccactctgccttccaagagttcgttaagaagcacgctaccaggctcaactccatgccatctgctttctactccgtgaaccttgtggctaggaagccagagaagaggactccacagactaactcctacgcccgtaagttcctcatgaactctcaatggcgtccagataggtgcgctgttattgctggtgctcttagatacccaaggtacaggtggtacgaccgtttcatgatcaagctcatcatgaagatgtccggcggagagactgacaccagaaaagaagttgtgtacaccgactgggagcaggttgcaaacttcgctagggaaattgctcacctcaccgataagccaaccctcaagtaa

SEQ ID NO: 234 - DNA, 645 bp, Artificial Sequence
  Expression Cassette
atggttattcagtctattacccacctctccccaaacctcgctttgccatctccactttctgtgtccaccaagaactacccagttgccgtgtgctcatccatgaagaccctcatcttgttctccaccagggatggacagaccagagagattgcttcctacctcgcctctgagcttaaagagcttggaatccaggctgacgttgcaaacgttcacaggattgaggaaccacagtgggagaactacgatagggttgtgatcggagcctccattaggtacggacattaccactctgccttccaagagttcgtgaagaagcacgctaccaggctcaactctatgccatccgctttctactccgtgaaccttgttgctaggaagccagagaagaggactccacagactaactcctacgcccgtaagttcctcatgaactctcaatggcgtccagataggtgcgctgttattgctggtgctcttagatacccaaggtacaggtggtacgaccgtttcatgatcaagctcattatgaagatgtccggcggagagactgacaccagaaaagaagttgtgtacaccgactgggagcaggttgcaaacttcgctagggaaattgctcacctcaccgataagccaaccctcaagtaa

SEQ ID NO: 235 - DNA, 867 bp, Artificial Sequence
  Expression Cassette
atgcttacttcagctactactccctccagctcctctgcttcttctagagcttctaccaggttcgcctctagctcaagacctagaagaactgcttacgctaggggaagaaggcttaggccagttcttgctatggctgcttctgatgatccaagggctagatctgttgctgttgtgggagctggaatttccggacttgttgctgcttacaggctctccaagtctggtgttagggttaccgttttcgaggctgatgatagggctggcggaaagattaggaccaactccgattctggattcctctgggatgagggtgctaacaccatgaagaccctgatcttgttctccaccagggatggacagaccagagagattgcttcctacctcgcctctgagcttaaagagcttggaatccaggctgacgttgcaaacgttcacaggattgaggaaccacagtgggagaactacgatagggttgtgatcggcgcttccattaggtacggacattaccactctgccttccaagagttcgtgaagaagcacgctaccaggctcaactctatgccatccgctttctactccgtgaaccttgttgctaggaagccagagaagaggactccacagactaactcctacgcccgtaagttcctcatgaactctcaatggcgtccagataggtgcgctgttattgctggtgctcttagatacccaaggtacaggtggtacgaccgtttcatgatcaagctcatcatgaagatgtccggcggagagactgacaccagaaaagaagttgtgtacaccgactgggagcaggttgcaaacttcgctagggaaattgctcacctcaccgataagccaaccctcaagtaa

SEQ ID NO: 236 - DNA, 1590 bp, Artificial Sequence
  Expression Cassette
atgactactgctgttactgctgctgtgtccttcccatctactaagaccaccagcctttccgccagatcctcctctgttatctccccagacaagatctcctacaagaaggtgcccctctactacagaaacgtgtcagctactggaaagatgggcccaatcagggctcagattgcttcctgctcatccatgtctacctccccattcaacccatctgctactgcttcaggtaggccaccaaagaccttcgctgttcttggagctggaattaccggacttaccgctgctcataggcttacccaacttggacataaggtgagggtgttcgagcagtctgatagggtgggaggatctatcaagaccgaagaggttgacggatggctcattgaaggtggaccaaacacccttttgtccggtgagcttgctgtggataagctcattgatgagttgggactcaacggcgagaggattgctgctgatccagctgctaagaaccgttacattgtgagaaggggaagggctcttgctgctccaatgtctcctccatctttcttcgcctcatccctgttctctccagtggctaagttcaagcttctcgctgagcttttcgctaggcgtagggttaggactaccgatgtttctcttgccgagttcgttgagtctcacttcggaagggaattcgtggattacgcccttaacccattcgtgggtggtgtttatgctggcgatccagagaagctttctgccaggcaatctttcccaaagctctgggagattgagcagacccacggatctcttatcaggggacaaattgctgcagccaaggctagaaaggctaggggagagccaagaccaggcatcttctcattcaagcacggacttcatgtgctccctgaagctttggctgctagacttccagctggtgctattacccttggagcttcccttgatgctattgtgccaggcgataagtggaacgttgtgtggcatgatgatgtggctacccacacccagtctttcgattctgttgttgtggctttgccagctccagctcttgctaggcttcaaattggaacccttggtgagaagccactcgctgctcttgctcttattgagcaccctccagtgtccagcttgttccttggattcagaagagagcaggttgcccacccacttgatggattcggagttcttgttccagccgttgagaagagatctgtgctcggagtgctgttctccagctcacttttcccaggtagggctccacttggtcatgttgctcttaccgttatggttggaggaactaggcaaccacagcttgcatctttgcctgctgatcagttgcttgctgctgttaggccagatcttacccagcttcttggagtgtctggtgatccagttttcgtgaggcataacttctggccaagggctatcccacagtacaaccttggacacgagcacttcattgctgctttggcagctggtgagagattccacccaggacttttcatgggaggacaagctagggatggaattgctgtgcctgcttgcattgctgccggtgaaaagcttgctgagagagctggacagtag

SEQ ID NO: 237 - DNA, 1596 bp, Artificial Sequence
  Expression Cassette
atgactactgctgttactgctgctgtgtccttcccatctactaagaccaccagcctttccgccagatcctcctctgttatctccccagacaagatctcctacaagaaggtgcccctctactacagaaacgtgtcagctactggaaagatgggcccaatcagggctcagattgcttcctgttcttccatggcttccgtgggaattatcggagctggaattgctggacttaccgctgcttacgagcttcacagaaggggacttgaggttaccgttttcgaggctaccgataggatcggaggattcattcagtccgagaggatcgatggattcctcgttgaacttggaccacagactcttcagaggacctctggtgatttcgaggaacttctcaggcaagtggatctcgaggatgcttgcattccagctagaccagttgctgccaacagattcattgtgaggggaggacagccaatcccacttcctagatctccaagagagcttctcaggaccccacttctttcaccaagagctaggcttaggcttctcgctgagccattcattcatagggctcataggtccaccgaggaatcagttgctaagttcaccagaagaaggctcggaccagaggttctcgattaccttgttgagcctttcgtggctggaatcttcgctggtgatccagagcaactttctgtgaggtacgccttcccaaagctgttcgagcttgagcaacagtacggatcccttttctggggactcatcagggataggatgaagcagagataccacccagccccaagacgttccatgttctcattcgttgagggactccacatgcttccaagggctcttgctgagagacttccagctcatgctattgtgaggaacgctgaggtgttggctattaggtgggatgagaagaacccatggacccttactttcaggcaacacggaagggcttccaccagattcttcgatattatcgtgtgcgctgtgccactccataggcttgctcaacttaggattcacccaccagtggatagaaggccactttctactgttgagcacccaccaattgctcttgtggctcttggattcaggcgtgagcaagttgcacatccacttgatggattcggaatgcttgtgccagctgttgagagggacttccagattttgggaaccctcttcagctcctcactcttcccagatagggctccagagggacatgttcttttgaccactttcgtgggaggaatgaggcatccagagcttgctttgcttccagaggataggcttgaggctcttgtgttgcaggatcttagaaggctcctcggaatttctggtgctccagttttcaggcatgtttggaggtgggagagatccattccacagtacaggcttggatacgatgctgtgcttgcttgcgttcacgacgttgagatgtctaggtccggacttttcctcgctggcaactacatggaaggcatctctgtgattgatgctctccacaccggacttaaggctgctagggctattattcagcacctcagagaagaggctgctggtggacttgctaagcttgtgcttggagattga

SEQ ID NO: 238 - DNA, 1536 bp, Artificial Sequence
  Expression Cassette
atggttattcagtctattacccacctctccccaaacctcgctttgccatctccactttctgtgtccaccaagaactacccagttgctgtgatgggcaacatctctgagagggaagaacctacctctatggcttccgtgggaattatcggagctggaattgctggacttaccgctgcttacgagcttcacagaaggggacttgaggttaccgttttcgaggctaccgataggatcggaggattcattcagtccgagaggatcgatggattcctcgttgaacttggaccacagactcttcagaggacctctggtgatttcgaggaacttctcaggcaagtggatctcgaggatgcttgcattccagctagacctgttgctgccaacagattcattgtgaggggaggacagccaatcccacttccaagatctccaagagagcttctcaggaccccacttctttcaccaagagctaggcttaggcttctcgctgagccattcattcatagggctcataggtccaccgaggaatcagttgctaagttcaccagaagaaggctcggaccagaggttctcgattaccttgttgagcctttcgtggctggaatcttcgctggtgatccagagcaattgtctgtgaggtacgccttcccaaagctgttcgagcttgagcaacagtacggatcccttttctggggactcatcagggataggatgaagcagagataccacccagccccaagacgttccatgttctcattcgttgagggactccacatgcttccaagggctcttgctgagagacttccagctcatgctattgtgaggaacgctgaggtgttggctattaggtgggatgagaagaacccatggacccttactttcaggcaacacggaagggcttccaccagattcttcgatattatcgtgtgcgctgtgccactccataggcttgctcaacttaggattcacccaccagtggatagaaggccactttctactgttgagcacccacctattgctcttgtggctcttggattcaggcgtgagcaagttgcacatccacttgatggattcggaatgcttgtgccagctgttgagagggatttccagattctcggaaccctcttcagctcctcacttttcccagatagggctccagagggacatgttcttttgaccactttcgtgggaggaatgaggcatccagagcttgctttgcttccagaggataggcttgaggctcttgtgttgcaggatcttagaaggctcctcggaatttctggtgctccagttttcaggcatgtttggaggtgggagagatccattccacagtacaggcttggatacgatgctgtgcttgcttgcgttcacgacgttgagatgtctaggtccggacttttcctcgctggcaactacatggaaggcatctctgtgattgatgctctccacaccggacttaaggctgctagggctattattcagcacctcagagaagaggctgctggtggacttgctaagcttgtgcttggagattga

SEQ ID NO: 239 - DNA, 1611 bp, Artificial Sequence
  Expression Cassette
atgactactgctgttactgctgctgtgtccttcccatctactaagaccaccagcctttccgccagatcctcctctgttatctccccagacaagatctcctacaagaaggtgcccctctactacagaaacgtgtcagctactggaaagatgggcccaatcagggctcagattgcttcctgctcatctatgatggctggctacgattctgtggtgattggaggtggaattgctggacttgctgctgcttacacccttcacaagaggggatacagggttctcgttatcgagtctactaacagggtgggcggagtgattcaaaccattactactccagagggctacatcctcgattgcggaccaaacactgttggaactggtgatgctaggctctggcaagagcttattgatctcggactcagagagaggattaccccagctgctccatgctccaagaggcgtttcattctcattaacggcaccccagttgagatcccaacttctccagtgggccttatcactaccaggcttttgtcttggaggggcaagcttagagttctcgctgagccattcatcaacaggggttctactgatccagatgagtccgtggctgctttcttcaccagaagaattggagctgaggctaccgctcaccttttggatccattcgttgctggtgtgtacgctggtgatccacagagactttctaccgctgctgttttcccatctctttgggaggctgctcaaaggtccggatctattgtgaggggaatgctctctaagccaaagcccaagacccaagtgtctgagccaaagatgaggtctaggaccttcactttcaggggtggtcttgctgaatggccaagggctcttgctcaagctcttggtgctggaaacgtttggaccgagagaagggttgtgaagttgcagccaagagactcatggtgggaggtgaccattgatggtgttaacggaccagagactctcatctcccgttccctcattattgctacccctgctttcaccgccgctgatcttattgagtctgttgatcaaagggctgctggtgctttgaggggtattccatatgctccagttgctgtggtgcacctcggattcagaagggatcagatctcccaagagttgtccggattcggagttcttgctccatcttctgagcagaggcagttccttggaattctctggacctccagcatcttcccacatgttgctccacacgatcatgtgcttaccactaccctttccggtggtgctattagaccagagcttgctgaaaggtctgacgaaacccttatcgaggctgctattagggatcaccaccagcttctcggaattaggggacagccaattttcacccatgttaccagatggcgtaccgctattgctcagtacactttcggtcacagggaaaggattgctaccttggtgcaactcgagcaaaggctcccaactattcagttcgctggatcctacagggatggtgttggagttccaaagacttgggcttctggtgttcaagctggtgagagaattgctgcagctcttgctgctcatggaaccactgctgtttctaccgaaaccgcttctggatga

SEQ ID NO: 240 - protein, 212 aa, Artificial Sequence
  Expression Cassette
MTTAVTAAVSFPSTKTTSLSARSSSVISPDKISYKKVPLYYRNVSATGKMGPIRAQIASCSSMDAPSDAFLWVKALHIIAVVCWFAALFYLPRLYVYHAMSEDDTSHRRFEVMERKLYRGIMWPSMIATLITAHFLVDWGDATRHYHEALWFYIKVGLVGLLVIYHFVCGYYRKKLIGNAHYKSHKFWRYFNEMPTLILFAVVILVVVKPQF

SEQ ID NO: 241 - protein, 248 aa, Artificial Sequence
  Expression Cassette
MVIQSITHLSPNLALPSPLSVSTKNYPVAVMGNISEREEPTSAKRVAVVGAGVSGLAAAYKLKSHGLSVTLFEADSRAGGKLKTVKKDGFIWDEGANTMDAPSDAFLWVKALHIIAVVCWFAALFYLPRLYVYHAMSEDDTSHRRFEVMERKLYRGIMWPSMIATLITAHFLVDWGDATRHYHEALWFYIKVGLVGLLVIYHFVCGYYRKKLIGNAHYKSHKFWRYFNEMPTLILFAVVILVVVKPQF

SEQ ID NO: 242 - protein, 361 aa, Artificial Sequence
  Expression Cassette
MTTAVTAAVSFPSTKTTSLSARSSSVISPDKISYKKVPLYYRNVSATGKMGPIRAQIASCSSMKPDAHQVKQFLLNLQDTICQQLTAVDGAEFVEDSWQREAGGGGRSRVLRNGGVFEQAGVNFSHVHGEAMPASATAHRPELAGRSFEAMGVSLVVHPHNPYVPTSHANVRFFIAEKPGADPVWWFGGGFDLTPFYGFEEDAIHWHRTARDLCLPFGEDVYPRYKKWCDEYFYLKHRNEQRGIGGLFFDDLNTPDFDRCFAFMQAVGKGYTDAYLPIVERRKAMAYGERERNFQLYRRGRYVEFNLVWDRGTLFGLQTGGRTESILMSMPPLVRWEYDYQPKDGSPEAALSEFIKVRDWV

SEQ ID NO: 243 - protein, 397 aa, Artificial Sequence
  Expression Cassette
MVIQSITHLSPNLALPSPLSVSTKNYPVAVMGNISEREEPTSAKRVAVVGAGVSGLAAAYKLKSHGLSVTLFEADSRAGGKLKTVKKDGFIWDEGANTMKPDAHQVKQFLLNLQDTICQQLTAVDGAEFVEDSWQREAGGGGRSRVLRNGGVFEQAGVNFSHVHGEAMPASATAHRPELAGRSFEAMGVSLVVHPHNPYVPTSHANVRFFIAEKPGADPVWWFGGGFDLTPFYGFEEDAIHWHRTARDLCLPFGEDVYPRYKKWCDEYFYLKHRNEQRGIGGLFFDDLNTPDFDRCFAFMQAVGKGYTDAYLPIVERRKAMAYGERERNFQLYRRGRYVEFNLVWDRGTLFGLQTGGRTESILMSMPPLVRWEYDYQPKDGSPEAALSEFIKVRDWV

SEQ ID NO: 244 - protein, 332 aa, Artificial Sequence
  Expression Cassette
MVIQSITHLSPNLALPSPLSVSTKNYPVAVCSSMKPDAHQVKQFLLNLQDTICQQLTAVDGAEFVEDSWQREAGGGGRSRVLRNGGVFEQAGVNFSHVHGEAMPASATAHRPELAGRSFEAMGVSLVVHPHNPYVPTSHANVRFFIAEKPGADPVWWFGGGFDLTPFYGFEEDAIHWHRTARDLCLPFGEDVYPRYKKWCDEYFYLKHRNEQRGIGGLFFDDLNTPDFDRCFAFMQAVGKGYTDAYLPIVERRKAMAYGERERNFQLYRRGRYVEFNLVWDRGTLFGLQTGGRTESILMSMPPLVRWEYDYQPKDGSPEAALSEFIKVRDWV

SEQ ID NO: 245 - protein, 243 aa, Artificial Sequence
  Expression Cassette
MTTAVTAAVSFPSTKTTSLSARSSSVISPDKISYKKVPLYYRNVSATGKMGPIRAQIASCSSMKTLILFSTRDGQTREIASYLASELKELGIQADVANVHRIEEPQWENYDRVVIGASIRYGHYHSAFQEFVKKHATRLNSMPSAFYSVNLVARKPEKRTPQTNSYARKFLMNSQWRPDRCAVIAGALRYPRYRWYDRFMIKLIMKMSGGETDTRKEVVYTDWEQVANFAREIAHLTDKPTLK

SEQ ID NO: 246 - protein, 279 aa, Artificial Sequence
  Expression Cassette
MVIQSITHLSPNLALPSPLSVSTKNYPVAVMGNISEREEPTSAKRVAVVGAGVSGLAAAYKLKSHGLSVTLFEADSRAGGKLKTVKKDGFIWDEGANTMKTLILFSTRDGQTREIASYLASELKELGIQADVANVHRIEEPQWENYDRVVIGASIRYGHYHSAFQEFVKKHATRLNSMPSAFYSVNLVARKPEKRTPQTNSYARKFLMNSQWRPDRCAVIAGALRYPRYRWYDRFMIKLIMKMSGGETDTRKEVVYTDWEQVANFAREIAHLTDKPTLK

SEQ ID NO: 247 - protein, 214 aa, Artificial Sequence
  Expression Cassette
MVIQSITHLSPNLALPSPLSVSTKNYPVAVCSSMKTLILFSTRDGQTREIASYLASELKELGIQADVANVHRIEEPQWENYDRVVIGASIRYGHYHSAFQEFVKKHATRLNSMPSAFYSVNLVARKPEKRTPQTNSYARKFLMNSQWRPDRCAVIAGALRYPRYRWYDRFMIKLIMKMSGGETDTRKEVVYTDWEQVANFAREIAHLTDKPTLK

SEQ ID NO: 248 - protein, 288 aa, Artificial Sequence
  Expression Cassette
MLTSATTPSSSSASSRASTRFASSSRPRRTAYARGRRLRPVLAMAASDDPRARSVAVVGAGISGLVAAYRLSKSGVRVTVFEADDRAGGKIRTNSDSGFLWDEGANTMKTLILFSTRDGQTREIASYLASELKELGIQADVANVHRIEEPQWENYDRVVIGASIRYGHYHSAFQEFVKKHATRLNSMPSAFYSVNLVARKPEKRTPQTNSYARKFLMNSQWRPDRCAVIAGALRYPRYRWYDRFMIKLIMKMSGGETDTRKEVVYTDWEQVANFAREIAHLTDKPTLK

SEQ ID NO: 249 - protein, 529 aa, Artificial Sequence
  Expression Cassette
MTTAVTAAVSFPSTKTTSLSARSSSVISPDKISYKKVPLYYRNVSATGKMGPIRAQIASCSSMSTSPFNPSATASGRPPKTFAVLGAGITGLTAAHRLTQLGHKVRVFEQSDRVGGSIKTEEVDGWLIEGGPNTLLSGELAVDKLIDELGLNGERIAADPAAKNRYIVRRGRALAAPMSPPSFFASSLFSPVAKFKLLAELFARRRVRTTDVSLAEFVESHFGREFVDYALNPFVGGVYAGDPEKLSARQSFPKLWEIEQTHGSLIRGQIAAAKARKARGEPRPGIFSFKHGLHVLPEALAARLPAGAITLGASLDAIVPGDKWNVVWHDDVATHTQSFDSVVVALPAPALARLQIGTLGEKPLAALALIEHPPVSSLFLGFRREQVAHPLDGFGVLVPAVEKRSVLGVLFSSSLFPGRAPLGHVALTVMVGGTRQPQLASLPADQLLAAVRPDLTQLLGVSGDPVFVRHNFWPRAIPQYNLGHEHFIAALAAGERFHPGLFMGGQARDGIAVPACIAAGEKLAERAGQ

SEQ ID NO: 250 - protein, 565 aa, Artificial Sequence
  Expression Cassette
MVIQSITHLSPNLALPSPLSVSTKNYPVAVMGNISEREEPTSAKRVAVVGAGVSGLAAAYKLKSHGLSVTLFEADSRAGGKLKTVKKDGFIWDEGANTMSTSPFNPSATASGRPPKTFAVLGAGITGLTAAHRLTQLGHKVRVFEQSDRVGGSIKTEEVDGWLIEGGPNTLLSGELAVDKLIDELGLNGERIAADPAAKNRYIVRRGRALAAPMSPPSFFASSLFSPVAKFKLLAELFARRRVRTTDVSLAEFVESHFGREFVDYALNPFVGGVYAGDPEKLSARQSFPKLWEIEQTHGSLIRGQIAAAKARKARGEPRPGIFSFKHGLHVLPEALAARLPAGAITLGASLDAIVPGDKWNVVWHDDVATHTQSFDSVVVALPAPALARLQIGTLGEKPLAALALIEHPPVSSLFLGFRREQVAHPLDGFGVLVPAVEKRSVLGVLFSSSLFPGRAPLGHVALTVMVGGTRQPQLASLPADQLLAAVRPDLTQLLGVSGDPVFVRHNFWPRAIPQYNLGHEHFIAALAAGERFHPGLFMGGQARDGIAVPACIAAGEKLAERAGQ

SEQ ID NO: 251 - protein, 531 aa, Artificial Sequence
  Expression Cassette
MTTAVTAAVSFPSTKTTSLSARSSSVISPDKISYKKVPLYYRNVSATGKMGPIRAQIASCSSMASVGIIGAGIAGLTAAYELHRRGLEVTVFEATDRIGGFIQSERIDGFLVELGPQTLQRTSGDFEELLRQVDLEDACIPARPVAANRFIVRGGQPIPLPRSPRELLRTPLLSPRARLRLLAEPFIHRAHRSTEESVAKFTRRRLGPEVLDYLVEPFVAGIFAGDPEQLSVRYAFPKLFELEQQYGSLFWGLIRDRMKQRYHPAPRRSMFSFVEGLHMLPRALAERLPAHAIVRNAEVLAIRWDEKNPWTLTFRQHGRASTRFFDIIVCAVPLHRLAQLRIHPPVDRRPLSTVEHPPIALVALGFRREQVAHPLDGFGMLVPAVERDFQILGTLFSSSLFPDRAPEGHVLLTTFVGGMRHPELALLPEDRLEALVLQDLRRLLGISGAPVFRHVWRWERSIPQYRLGYDAVLACVHDVEMSRSGLFLAGNYMEGISVIDALHTGLKAARAIIQHLREEAAGGLAKLVLGD

SEQ ID NO: 252 - protein, 531 aa, Artificial Sequence
  Expression Cassette
MTTAVTAAVSFPSTKTTSLSARSSSVISPDKISYKKVPLYYRNVSATGKMGPIRAQIASCSSMASVGIIGAGIAGLTAAYELHRRGLEVTVFEATDRIGGFIQSERIDGFLVELGPQTLQRTSGDFEELLRQVDLEDACIPARPVAANRFIVRGGQPIPLPRSPRELLRTPLLSPRARLRLLAEPFIHRAHRSTEESVAKFTRRRLGPEVLDYLVEPFVAGIFAGDPEQLSVRYAFPKLFELEQQYGSLFWGLIRDRMKQRYHPAPRRSMFSFVEGLHMLPRALAERLPAHAIVRNAEVLAIRWDEKNPWTLTFRQHGRASTRFFDIIVCAVPLHRLAQLRIHPPVDRRPLSTVEHPPIALVALGFRREQVAHPLDGFGMLVPAVERDFQILGTLFSSSLFPDRAPEGHVLLTTVVGGMRHPELALLPEDRLEALVLQDLRRLLGISGAPVFRHVWRWERSIPQYRLGYDAVLACVHDVEMSRSGLFLAGNYMEGISVIDALHTGLKAARAIIQHLREEAAGGLAKLVLGD

SEQ ID NO: 253 - protein, 567 aa, Artificial Sequence
  Expression Cassette
MVIQSITHLSPNLALPSPLSVSTKNYPVAVMGNISEREEPTSAKRVAVVGAGVSGLAAAYKLKSHGLSVTLFEADSRAGGKLKTVKKDGFIWDEGANTMASVGIIGAGIAGLTAAYELHRRGLEVTVFEATDRIGGFIQSERIDGFLVELGPQTLQRTSGDFEELLRQVDLEDACIPARPVAANRFIVRGGQPIPLPRSPRELLRTPLLSPRARLRLLAEPFIHRAHRSTEESVAKFTRRRLGPEVLDYLVEPFVAGIFAGDPEQLSVRYAFPKLFELEQQYGSLFWGLIRDRMKQRYHPAPRRSMFSFVEGLHMLPRALAERLPAHAIVRNAEVLAIRWDEKNPWTLTFRQHGRASTRFFDIIVCAVPLHRLAQLRIHPPVDRRPLSTVEHPPIALVALGFRREQVAHPLDGFGMLVPAVERDFQILGTLFSSSLFPDRAPEGHVLLTTFVGGMRHPELALLPEDRLEALVLQDLRRLLGISGAPVFRHVWRWERSIPQYRLGYDAVLACVHDVEMSRSGLFLAGNYMEGISVIDALHTGLKAARAIIQHLREEAAGGLAKLVLGD

SEQ ID NO: 254 - protein, 567 aa, Artificial Sequence
  Expression Cassette
MVIQSITHLSPNLALPSPLSVSTKNYPVAVMGNISEREEPTSAKRVAVVGAGVSGLAAAYKLKSHGLSVTLFEADSRAGGKLKTVKKDGFIWDEGANTMASVGIIGAGIAGLTAAYELHRRGLEVTVFEATDRIGGFIQSERIDGFLVELGPQTLQRTSGDFEELLRQVDLEDACIPARPVAANRFIVRGGQPIPLPRSPRELLRTPLLSPRARLRLLAEPFIHRAHRSTEESVAKFTRRRLGPEVLDYLVEPFVAGIFAGDPEQLSVRYAFPKLFELEQQYGSLFWGLIRDRMKQRYHPAPRRSMFSFVEGLHMLPRALAERLPAHAIVRNAEVLAIRWDEKNPWTLTFRQHGRASTRFFDIIVCAVPLHRLAQLRIHPPVDRRPLSTVEHPPIALVALGFRREQVAHPLDGFGMLVPAVERDFQILGTLFSSSLFPDRAPEGHVLLTTVVGGMRHPELALLPEDRLEALVLQDLRRLLGISGAPVFRHVWRWERSIPQYRLGYDAVLACVHDVEMSRSGLFLAGNYMEGISVIDALHTGLKAARAIIQHLREEAAGGLAKLVLGD

SEQ ID NO: 255 - protein, 511 aa, Artificial Sequence
  Expression Cassette
MVIQSITHLSPNLALPSPLSVSTKNYPVAVMGNISEREEPTSMASVGIIGAGIAGLTAAYELHRRGLEVTVFEATDRIGGFIQSERIDGFLVELGPQTLQRTSGDFEELLRQVDLEDACIPARPVAANRFIVRGGQPIPLPRSPRELLRTPLLSPRARLRLLAEPFIHRAHRSTEESVAKFTRRRLGPEVLDYLVEPFVAGIFAGDPEQLSVRYAFPKLFELEQQYGSLFWGLIRDRMKQRYHPAPRRSMFSFVEGLHMLPRALAERLPAHAIVRNAEVLAIRWDEKNPWTLTFRQHGRASTRFFDIIVCAVPLHRLAQLRIHPPVDRRPLSTVEHPPIALVALGFRREQVAHPLDGFGMLVPAVERDFQILGTLFSSSLFPDRAPEGHVLLTTFVGGMRHPELALLPEDRLEALVLQDLRRLLGISGAPVFRHVWRWERSIPQYRLGYDAVLACVHDVEMSRSGLFLAGNYMEGISVIDALHTGLKAARAIIQHLREEAAGGLAKLVLGD

SEQ ID NO: 256 - protein, 536 aa, Artificial Sequence
  Expression Cassette
MTTAVTAAVSFPSTKTTSLSARSSSVISPDKISYKKVPLYYRNVSATGKMGPIRAQIASCSSMMAGYDSVVIGGGIAGLAAAYTLHKRGYRVLVIESTNRVGGVIQTITTPEGYILDCGPNTVGTGDARLWQELIDLGLRERITPAAPCSKRRFILINGTPVEIPTSPVGLITTRLLSWRGKLRVLAEPFINRGSTDPDESVAAFFTRRIGAEATAHLLDPFVAGVYAGDPQRLSTAAVFPSLWEAAQRSGSIVRGMLSKPKPKTQVSEPKMRSRTFTFRGGLAEWPRALAQALGAGNVWTERRVVKLQPRDSWWEVTIDGVNGPETLISRSLIIATPAFTAADLIESVDQRAAGALRGIPYAPVAVVHLGFRRDQISQELSGFGVLAPSSEQRQFLGILWTSSIFPHVAPHDHVLTTTLSGGAIRPELAERSDETLIEAAIRDHHQLLGIRGQPIFTHVTRWRTAIAQYTFGHRERIATLVQLEQRLPTIQFAGSYRDGVGVPKTWASGVQAGERIAAALAAHGTTAVSTETASG

SEQ ID NO: 257 - protein, 572 aa, Artificial Sequence
  Expression Cassette
MVIQSITHLSPNLALPSPLSVSTKNYPVAVMGNISEREEPTSAKRVAVVGAGVSGLAAAYKLKSHGLSVTLFEADSRAGGKLKTVKKDGFIWDEGANTMMAGYDSVVIGGGIAGLAAAYTLHKRGYRVLVIESTNRVGGVIQTITTPEGYILDCGPNTVGTGDARLWQELIDLGLRERITPAAPCSKRRFILINGTPVEIPTSPVGLITTRLLSWRGKLRVLAEPFINRGSTDPDESVAAFFTRRIGAEATAHLLDPFVAGVYAGDPQRLSTAAVFPSLWEAAQRSGSIVRGMLSKPKPKTQVSEPKMRSRTFTFRGGLAEWPRALAQALGAGNVWTERRVVKLQPRDSWWEVTIDGVNGPETLISRSLIIATPAFTAADLIESVDQRAAGALRGIPYAPVAVVHLGFRRDQISQELSGFGVLAPSSEQRQFLGILWTSSIFPHVAPHDHVLTTTLSGGAIRPELAERSDETLIEAAIRDHHQLLGIRGQPIFTHVTRWRTAIAQYTFGHRERIATLVQLEQRLPTIQFAGSYRDGVGVPKTWASGVQAGERIAAALAAHGTTAVSTETASG

SEQ ID NO: 258 - protein, 543 aa, Artificial Sequence
  Expression Cassette
MLTSATTPSSSSASSRASTRFASSSRPRRTAYARGRRLRPVLAMAASDDPRARSVAVVGAGISGLVAAYRLSKSGVRVTVFEADDRAGGKIRTNSDSGFLWDEGANTMTESEAEVSSLIDDLGLREKQQLPISQNKMYIARDGLPVLLPSNPAALLTSNILSAKSKLQIMLEPFLWRKHNATELSDEHVQESVGEFFERHFGKEFVDYVIDPFVAGTCGGDPQSLSMHHTFPEVWNIEKRFGSVFAGLIQSTLLSKKEKGGENASIKKPRVRGSFSFQGGMQTLVDTMCKQLGEDELKLQCEVLSLSYNQKGIPSLGNWSVSSMSNNTSEDQSYDAVVVTAPIRNVKEMKIMKFGNPFSLDFIPEVTYVPLSVMITAFKKDKVKRPLEGFGVLIPSKEQHNGLKTLGTLFSSMMFPDRAPSDMCLFTTIVGGSRNRKLANASTDELKQIVSSDLQQLLGTEDEPSFVNHLFWSNAFPLYGHNYDSVLRAIDKMEKDLPGFFYAGNHKGGLSVGKAMASGCKAAELVISYLDSHIYVKMDEKTA

SEQ ID NO: 259 - protein, 560 aa, Artificial Sequence
  Expression Cassette
MVIQSITHLSPNLALPSPLSVSTKNYPVAVMGNISEREEPTSAKRVAVVGAGVSGLAAAYKLKSHGLSVTLFEADSRAGGKLKTVKKDGFIWDEGANTATKHPDAAPNLIVTEAKDRVGGNIITREENGFLWEEGPNSFQPSDPMLTMVVDSGLKDDLVLGDPTAPRFVLWNGKLRPVPSKLTDLPFFDLMSIGGKIRAGFGALGIRPSPPGREESVEEFVRRNLGDEVFERLIEPFCSGVYAGDPSKLSMKAAFGKVWKLEQNGGSIIGGTFKAIQERKNAPKAERDPRLPKPQGQTVGSFRKGLRMLPEAISARLGSKVKLSWKLSGITKLESGGYNLTYETPDGLVSVQSKSVVMTVPSHVASGLLRPLSESAANALSKLYYPPVAAVSISYPKEAIRTECLIDGELKGFGQLHPRTQGVETLGTIYSSSLFPNRAPPGRILLLNYIGGSTNTGILSKSEGELVEAVDRDLRKMLIKPNSTDPLKLGVRVWPQAIPQFLVGHFDILDTAKSSLTSSGYEGLFLGGNYVAGVALGRCVEGAYETAIEVNNFMSRYAYK

SEQ ID NO: 260 - protein, 560 aa, Artificial Sequence
  Expression Cassette
MVIQSITHLSPNLALPSPLSVSTKNYPVAVMGNISEREEPTSAKRVAVVGAGVSGLAAAYKLKSHGLSVTLFEADSRAGGKLKTVKKDGFIWDEGANTATKHPDAAPNLIVTEAKDRVGGNIITREENGFLWEEGPNSFQPSDPMLTMVVDSGLKDDLVLGDPTAPRFVLWNGKLRPVPSKLTDLPFFDLMSIGGKIRAGFGALGIRPSPPGREESVEEFVRRNLGDEVFERLIEPFCSGVYAGDPSKLSMKAAFGKVWKLEQNGGSIIGGTFKAIQERKNAPKAERDPRLPKPQGQTVGSFRKGLRMLPEAISARLGSKVKLSWKLLGITKLESGGYNLTYETPDGLVSVQSKSVVMTVPSHVASGLLRPLSESAANALSKLYYPPVAAVSISYPKEAIRTECLIDGELKGFGQLHPRTQGVETLGTIYSSSLFPNRAPPGRILLLNMIGGSTNTGILSKSEGELVEAVDRDLRKMLIKPNSTDPLKLGVRVWPQAIPQFLVGHFDILDTAKSSLTSSGYEGLFLGGNYVAGVALGRCVEGAYETAIEVNNFMSRYAYK

SEQ ID NO: 261 - protein, 538 aa, Artificial Sequence
  Expression Cassette
MVIQSITHLSPNLALPSPLSVSTKNYPVAVMGNISEREEPTSAKRVAVVGAGVSGLAAAYKLKSHGLSVTLFEADSRAGGKLKTVKKDGFIWDEGANTMTESALEASRLIDDLGLEDRLQYPNSQHKRYTVKDGAPALIPSDPIALMKSSLLSTKSKFKLFLEPFLYDKSSTKSSKKVSDEHISESVGSFFERHFGKEVVDYLIDPFVAGTSAGDPESLSIRHAFPGLWNLEKKYGSIIVGAIMSKLTAKGDKKGSAVSGKGRNKRASFSFHGGMQTLVDALHKEVGDGNVKLGAQVLSLACICDGLSASDGWSISVDSKDASNKELTKNHSFDAVIMTAPLSNVQRMKFTKGGAPFVLDFLPKVDYLPLSLMVTAFKKEDVKRPLEGFGVLIPYKEQQKHGLKTLGTLFSSMMFPDRAPNDQHLFTTFVGGSHNRDLAGAPTSILKQLVTSDLGKLLGVEGQPTFVKHIHWRNAFPLYGHDYDSALEAIGKMESDLPGFFYAGNNKDGLAVGNVIASGSKTADLVISYLESGIKQDN

SEQ ID NO: 262 - protein, 538 aa, Artificial Sequence
  Expression Cassette
MVIQSITHLSPNLALPSPLSVSTKNYPVAVMGNISEREEPTSAKRVAVVGAGVSGLAAAYKLKSHGLSVTLFEADSRAGGKLKTVKKDGFIWDEGANTMTESALEASRLIDDLGLEDRLQYPNSQHKRYTVKDGAPALIPSDPIALMKSSLLSTKSKFKLFLEPFLYDKSSTKSSKKVSDEHISESVGSFFERHFGKEVVDYLIDPFVAGTSAGDPESLSIRHAFPGLWNLEKKYGSIIVGAIMSKLTAKGDKKGSAVSGKGRNKRASFSFHGGMQTLVDALHKEVGDGNVKLGAQVLSLACICDGLSASDGWSISVDSKDASNKELTKNHSFDAVIMTAPLSNVQRMKFTKGGAPFVLDFLPKVDYLPLSLMVTAFKKEDVKRPLEGFGVLIPYKEQQKHGLKTLGTLFSSMMFPDRAPNDQHLFTTIVGGSHNRDLAGAPTSILKQLVTSDLGKLLGVEGQPTFVKHIHWRNAFPLYGHDYDSALEAIGKMESDLPGFFYAGNNKDGLAVGNVIASGSKTADLVISYLESGIKQDN

SEQ ID NO: 263 - DNA, 1491 bp, Artificial Sequence
  Expression Cassette
atggttattcagtctattacccacctctccccaaacctcgctttgccatctccactttctgtgtccaccaagaactacccagttgctgtgatgggcaacatctctgagagagaggaacctacctctgctaagagggttgcagttgttggagctggtgtttctggacttgctgctgcttacaagctcaagtcccacggactttcagtgacccttttcgaggctgattctagggctggtggaaagcttaagaccgtgaagaaggatggcttcatctgggatgagggtgccaacactatgctaaaagtgttattgctctttgtgttgctgattgcggggatcgtggttggcccgatgattgccggccatcagggttatgtgctgatccagaccgacaactacaatatcgaaaccagcgtcacgggcctggcgatcatattgattctggcgatggtagtgctgtttgccattgagtggctactgcggcggatcttccgcactggcgcgcacacccgtgggtggtttgtcggacgtaagcgtcgccgtgcacgtaagcagaccgaacaggcgctgctgaaactggcggaaggcgattatcagcaagttgaaaagctgatggcgaaaaatgccgatcacgcggaacaaccggtggtgaactatctactggctgccgaagccgcgcaacaacgtggtgatgaagcacgcgccaaccaacatctggaacgcgcagcggagctggccggcaacgacaccattccggtagaaatcacccgcgtacgtctgcaactggcccgtaatgaaaaccatgctgcacgccacggcgtggataagctgctggaagttacgccacgccatccggaagtattacgtctggcggaacaggcgtatatccgcacaggtgcatggagttcgctgctggatattatcccatcaatggcgaaagcccatgttggtgatgaagaacatcgtgcaatgctggaacaacaggcatggattggcctgatggatcaggcgcgtgccgataacggtagcgaaggtttgcgtaactggtggaaaaaccaaagccggaaaacgcgtcatcaggtagcgttgcaggtggcaatggcggaacatcttattgaatgtgacgatcatgatactgcccagcaaattatcatcgatggcctgaaacgccagtacgacgatcgcctactgctgccgattcctcgactgaaaacaaacaatccggaacagctggaaaaagtgctgcgccagcaaatcaaaaacgtcggcgatcgcccgctgttgtggagcacactgggccagtcactgatgaagcacggagaatggcaggaagcatcgctcgccttccgcgcagcgctgaaacaacgtccggacgcctacgattacgcatggcttgccgacgcgctggacagactgcacaagccggaagaagctgcagctatgcgtcgcgacggtttgatgttaacgttgcagaataacccgccacagtag

SEQ ID NO: 264 - protein, 496 aa, Artificial Sequence
  Expression Cassette
MVIQSITHLSPNLALPSPLSVSTKNYPVAVMGNISEREEPTSAKRVAVVGAGVSGLAAAYKLKSHGLSVTLFEADSRAGGKLKTVKKDGFIWDEGANTMLKVLLLFVLLIAGIVVGPMIAGHQGYVLIQTDNYNIETSVTGLAIILILAMVVLFAIEWLLRRIFRTGAHTRGWFVGRKRRRARKQTEQALLKLAEGDYQQVEKLMAKNADHAEQPVVNYLLAAEAAQQRGDEARANQHLERAAELAGNDTIPVEITRVRLQLARNENHAARHGVDKLLEVTPRHPEVLRLAEQAYIRTGAWSSLLDIIPSMAKAHVGDEEHRAMLEQQAWIGLMDQARADNGSEGLRNWWKNQSRKTRHQVALQVAMAEHLIECDDHDTAQQIIIDGLKRQYDDRLLLPIPRLKTNNPEQLEKVLRQQIKNVGDRPLLWSTLGQSLMKHGEWQEASLAFRAALKQRPDAYDYAWLADALDRLHKPEEAAAMRRDGLMLTLQNNPPQ

SEQ ID NO: 265 - protein, 534 aa, Amaranthus; identical to SEQ ID NO: 1

SEQ ID NO: 266 - protein, 461 aa, Salinibacter; identical to SEQ ID NO: 53

SEQ ID NO: 267 - protein, 469 aa, Rhodothermus; identical to SEQ ID NO: 51

SEQ ID NO: 268 - protein, 461 aa, Salinibacter; identical to SEQ ID NO: 52

SEQ ID NO: 269 - protein, 469 aa, Rhodothermus; identical to SEQ ID NO: 55

SEQ ID NO: 270 - protein, 472 aa, Halothiobacillus; identical to SEQ ID NO: 64

SEQ ID NO: 271 - protein, 441 aa, Coralio; identical to SEQ ID NO: 68

SEQ ID NO: 272 - protein, 463 aa, Magnetococcus
MTKNPILIIGGGISGLSTAWFLHKKGEKVILLESRDRVGGNIRTSRNPEGYLIEHGPNSTLQKPGDEEDALGRIITDMALESELQEANPLAARRFVMKGGQLHVLPTSPPGFIKTPLFSLSAKLRLCLEPFIGKSEQEESIAQFVIRRLGQEFLDYAIEPFVSGVYAGDPKQLSVRAAVAKIYALEAKYGSLIKGAIALGKIRKAAGMPRGRMISFETGMETLPATIANRLPHQSIHTNAQVTALCQHGAAWQVSWQQGGQHGGEPHSIIASQVVLATPASVSAQLLRPLSPQAADLLESIRYAPVDSVALGYAKQDINHSLDGFGFLIPRKEQVTTLGGLFSTTLFPGRAPQDKALLTCFIGGMTNPSITQWSEEKVVTQVDQDMMAALGIQHGAEYVHLTRYTHAIAQYEQGHLQRVGDIDRALAGYKGLHLRANWRDGVSVSDCVLNGEKSAQKILAGVS

SEQ ID NO: 273 - protein, 467 aa, Opitutus; identical to SEQ ID NO: 57

SEQ ID NO: 274 - protein, 451 aa, Melioribacter; identical to SEQ ID NO: 63

SEQ ID NO: 275 - protein, 501 aa, Physcomitrella
VAVVGAGVSGLAAAHRLRSAGVAVTVFEAQNAVGGKIQSFSNDGLIWEQGPNTMVETEPEVSSLIDELGLREKQQWPVMQNKRYVVRDGKAVQLPSNPLGLITTKLLSAQAKCQILLEPFLWKRKEVPLKEAANGRENVGNFITRHFGREVVDYLVDPFIAGTSGSDPDSVSIRHTFPDLFAIEERYGSLLIGGVKSSFKKKSGSKKESFKVQSDSAKVTPAQKRPRGSFSFVGGMQTLAHALSERLDEESLELNSSVLNLASDQQGNPSRNNWTVTYKKENSQQKEKHFDAVILTTPLHNLQELGIEKNGIPYALDFIPEIVYQPMSVIVTAFKESDVKNSLKGFGVLVPRMEKKNGFFTLGTMFSSSMFPDRAPPGQVVFTTFVGGSRNRALASAPFEEVKAVALEDLRKIVGVQGPPVAVKHIFWKQAFPQYSLDYNEFLSSLEKMESDLPGLFYAGNHRGGLSVGKSVASGCKAAEHVLSMLEGTGGRKIFTMASTK

SEQ ID NO: 276 - protein, 511 aa, Ricinus <angiosperm>; identical to SEQ ID NO: 9

SEQ ID NO: 277 - protein, 476 aa, Chromohalobacter
MQHEEQLDATDQAVGEARRDVVVVGGGASGLAAARAAARRGLAVSVLERGSHAGGNLRTHRDGAWQVEVGPNTLVMKPPLHTLLDELGLLDEAQPANPDARRRYIAFHGRPVALPTHVLKAPANPLIGLRGSWSVLREPFRAGPPRDEESLADFVVRRLGRHVLDHLVDPFVSGVYAGDPARLSAQAAMPRLVALEREYGSLVRGGLRRLRQSRREPPALPREWRGQLVSFPAGLQRLAERLAEDIADQPGASVQCGCEVVAVGREADGWQVETAAGQRIRTRELVLAVPAPTAAALLAPLDAALAAPLEEIAYPPVNAVSVGFRRADVDHPLDGFGMLIPGVERRRTLGALFSSTLFPGRAPSDHVLLTAFLGGRRQPEAAAGDDAEQVAQVVADLGDLLGIHAEPVWQCVSRWPQAIPQYERGHLARIAALDAALEAHPGLSLLGNWRDGIAVGDCLENGRRLGERLAETPDRR

SEQ ID NO: 278 - protein, 462 aa, Leptospirillum; identical to SEQ ID NO: 75

SEQ ID NO: 279 - protein, 514 aa, Selaginella; identical to SEQ ID NO: 44

SEQ ID NO: 280 - protein, 520 aa, Selaginella; identical to SEQ ID NO: 43

SEQ ID NO: 281 - protein, 508 aa, Arabidopsis; identical to SEQ ID NO: 22

SEQ ID NO: 282 - protein, 454 aa, Acidithiobacillus
MSSETVIVVGAGLTGLSATWYLHQRGIPALLLEAEAEVGGNLRSRSEDGFLRDLGPNSLMIKGDLLPDLIRQLQLEDRVVEANPLARRRFVLNRRGHPVALGPDVLFSSSLLSLSARLRLLSEPWRPRRPQSQNDESIADFVRRRLGPEALTWMVDPFVSGVFAGDPEKLSVTAALPRLAAMEAESGSLLRAALRRRRAGKKEGSSRLVSFRGGLQELPRALAARLPPDRLALSRPLTHLQRRGELWHLQTPAGDLECRRLVLALPAAESARLLRAEAPELAAELEAIVYPAVATVALGFPREAVDHRLDGFGLLIPRRLGIETLGVLFSSTLFPERAPPGMVLLTAFLGGAQQDISGRSPAELEAQALADLRPILGIRGDPAYHRCALWPRAIPQYALGHRQRVERIHELRRQLAGLELLGNWQGGVALGDCVVQADAFQRTFAQVDTATGPS

SEQ ID NO: 283 - protein, 512 aa, Arabidopsis; identical to SEQ ID NO: 23

SEQ ID NO: 284 - protein, 502 aa, Glycine; identical to SEQ ID NO: 11

SEQ ID NO: 285 - protein, 474 aa, Chloroflexus; identical to SEQ ID NO: 73

SEQ ID NO: 286 - protein, 499 aa, Medicago; identical to SEQ ID NO: 13

SEQ ID NO: 287 - protein, 475 aa, Chloroflexus; identical to SEQ ID NO: 77

SEQ ID NO: 288 - protein, 508 aa, Vitis; identical to SEQ ID NO: 8

SEQ ID NO: 289 - protein, 544 aa, Zea; identical to SEQ ID NO: 31

SEQ ID NO: 290 - protein, 478 aa, Arabidopsis
MASGAVADHQIEAVSGKRVAVVGAGVSGLAAAYKLKSRGLNVTVFEADGRVGGKLRSVMQNGLIWDEGANTMTEAEPEVGSLLDDLGLREKQQFPISQKKRYIVRNGVPVMKKSSKVSDASAEESVSEFFQRHFGQEVVDYLIDPFVGGTSAADPDSLSMKHSFPDLWNVEKSFGSIIVGAIRTKFAAKGGKSRDTKSSPGTKKGSRGSFSFKGGMQILPDTLCKSLSHDEINLDSKVLSLSYNSGSRQENWSLSCVSHNETQRQNPHYDAVIMTAPLCNVKEMKVMKGGQPFQLNFLPEINYMPLSVLITTFTKEKVKRPLEGFGVLIPSKEQKHGFKTLGTLFSSMMFPDRSPSDVHLYTTFIGGSRNQELAKASTDELKQVVTSDLQRLLGVEGEPVSVNHYYWRKAFPLYDSSYDSVMEAIDKMENDLPGFFYAGNHRGGLSVGKSIASGCKAADLVISYLESCSNDKKPNDSL

SEQ ID NO: 291 - protein, 441 aa, Hydrogenobacter
MIDVAVVGAGISGLSIAYHLKKAGLEVKVFEKEDAVGGNIQTAYIDGYVCELGPQTILADSKVEEFLKDAGIKPIYANPSSKKRYIYRKGKLVALPLSPVEFLLSPFLSLGGKLRVLKEPFVPRSPKQEESIAEFVRRRFGREFLDYVVAPFVSGVYAGDPEELSVKYAVRKVYELEQKYGSVIKGAIKLKALGPSGKLISFEGGNATLIRKLSESLEVHKENVVLRIRRKDDIFILDTKEGKVTAKAVVVSTPATSTGYLLRDLSWSISEEFDKIYYAPVLVVHVAVKFGVLPEGFGFLVPKKENKRILGVIFSSNLFEGRSPEGKSLITVYIGGATDPEIIEYEDEAIVSVLERELRETVDIRDWDLLKITRWKKGIPQYTVGYGRYLELANSIEMEQPGLFLSGNYLYGVSVADCIRVSHHIAKRVIDFLEVKGRTVV

SEQ ID NO: 292 - protein, 458 aa, Thermovibrio; identical to SEQ ID NO: 97

SEQ ID NO: 293 - protein, 462 aa, Ignavibacterium; identical to SEQ ID NO: 59

SEQ ID NO: 294 - protein, 544 aa, Sorghum <genus>; identical to SEQ ID NO: 28

SEQ ID NO: 295 - protein, 456 aa, Desulfurobacterium; identical to SEQ ID NO: 78

SEQ ID NO: 296 - protein, 446 aa, Acidithiobacillus; identical to SEQ ID NO: 95

SEQ ID NO: 297 - protein, 433 aa, Thermocrinis
MMDVIVVGAGISGLSVAFRLSKEGLKVKVLEKEEEPGGNIRTRKVGDFLCELGPQTVLADGEVVDFFREVGIQPQEASPSSSVRYIYKRGKLIPLPNSPVKFLTSPLLSLGGKLRVLMEPFVAPSVKTEETVAQFVRRRLGEEFLHYVITPFVRGVYAGDPEELSIKYAFRRVYQLEREYGSLIRAAIKLKRLGPPGKIISFEGGNQSIIQQLASYVDLETENVALRIRRKDDRYILDTKEGKYEARCVVVASPATSAGYLLRDISWSAAQELDKIYYAPVVVVHVATSQNIPDGFGFLAPQKEDLRILGVLFSSRIFPNKAPQGKELLTIYMGGATDPEVVEYEDELIMRIVEEDLRKSLGLTQLEFLLVTRWKRAIPQYTLGYGRYIELVEALQRENPGLFITGNYLEGVSVADCIKRSKRVVQEVVKFFR

SEQ ID NO: 298 - protein, 440 aa, Laribacter
MVVVIGAGISGLSCAWHLQQRGIPVVVLEAGSRVGGKIGTVAADGYRLELGPNTLYGHAGHLDLLERLGLTAAIRPAAAVVRHRFVLRGDRYEALPSGPLSFLTGSQFGARSKWLALTEPFRRNRPVREPETVAAFFRRRLGDEFVERAISPFVGGIFAGDPEELVAGLTLPVIHEAERQSGSIVRGMFARRKTFRRKATFTLNEGLQQLPETLAQGLDVRLDTSVQALERLETGWRVRTPAGELDADEVVLAVPADVAGQLLASHFPAIAANLANVTYAPVAVLHTAWPRSTVGHDLDGFGGLNPKVEKPFAAGSIWSGSLFPDRTPAGETLLTTFVGGMQFLDRYRHDDATLVALALEELRRLYRIQGEPTLCRLTRQEQAIPQYDSHALPLASAVSDLHEHGIRVCANWHGGVSVVDCLDKGQQVAVQCLLDYPPAS

SEQ ID NO: 299 - protein, 446 aa, Acidithiobacillus
MEEVIIIGGGISGLATAYFLRKRGWSPLLLEAGAAPGGNLQSRQEEGYLRDMGPNSLMLKGRIVPEWLRELQLEGDIVEANPLAGRRYVLNRHRQPVALGPGVLFGGGLLSIRGRLRLLGEPFQPPHPTPDGEESIADFVRRRLGDEALTWLVDPFVSGVFAGNPARLSVQATLPRLAALEQDGGSLLRGALRARKKKLPGTPKTRLVSFREGLQVLPLRVANTLGDTLRCDTPVDQLAYSGDMWQVGSGNQTWQSKRLVLALPAGAAARLLAQTDATLARELDAIPYPAVGSLSIGFRRPQVEHPLDGFGMLIPRVMGLETLGVLFSSTLFPGRAPAGQVLLTAFIGGSQNVLAGRDDDDLLATVLREIGPLLGISGDPVFSRCRVWPKAIPQYEIGHLDRMKRIDTLSAGHPGLHFRANWQGGVALGDCIEQAWEFSQTADWQH

SEQ ID NO: 300 - protein, 453 aa, Deferribacter
MKIAIIGGGISGISTAFWLEYFAKERLKSIDITIFEKNKRLGGTINTFYKDNFIIESGPNGFLDSKPYTVETFEKAGLGDNLIRSNELAKKRYIMRGGVLHKLPEKPNEFFSSKLLSFKGKLRVISELFIPAKKDEYDETIEEFAYRRLGKEAADYLISPMVSGVFAGDPSKLSLKSCFPVIYNLEKEYGGLFKAMFKKKGKKSGPAGPGGNLTSYKGGLIKGINALTEQLSNTKIYLGEEVTGLDKTNGSFKVKTTNSCDNYDIVIITSPAYVAAEFIKGLSVELSDKLLKLNYAPMYVIGFGFKEEDVLDPLDGFGFLVPHNENRKILGALFTSSIFPERAPKGYKLIRVMIGGDKNRWVLNCSEDELRDIAFNEIKDILGVKGNSVVEKSFYWERAIPQYYQGHEKLVEDIESICMDINNIYIGGNLLYGIGINDCTKRSIDIARGVLGG

SEQ ID NO: 301 - protein, 471 aa, Geobacter; identical to SEQ ID NO: 94

SEQ ID NO: 302 - protein, 450 aa, Thermodesulfovibrio
MGSAEIVIVGGGISGLSLAYFLIQKNSQLNIKIVEAEKRAGGKIITENISGFLCEGGVNGFLSNKPSTISLAKELNIEPLRGSESSKIRYILIDGKLIRVPENPIKFFLTPLLSFSGKIRMLREYFTPPLKEEIDETVESFVSRRVGKEFYEKLIDAMSTGIYAGDPSKMSMKSCFPKVYWLEKRHGGLLKGLIALKKEKKDTKAQPSGVLMSFKGGMSELIQSLERHLSSRILKGKKVLSIDRKNTYYTVHLDDGNFIEAEKVILACPAHESAEILKELSSELSDILKTIPYPPLSVVAFGFKKEQIGFGTSLYGFLIPYREQRKILGTLFDSSIFPNRAPESYVLLRSMIGGRRAPELAMLPDEKLIDTALSELKPLLNIKGDPEFIKIFRWEKAIPQYELGHEDKLNRIEQILSEFSGLYLTGNAYRGVSVNDCIENSLKLAEGIMV

SEQ ID NO: 303 - protein, 469 aa, Geobacter
MKKAIVAGGGISGLATAYLLKTRAAEEGLELDVTLVEREERLGGKIWSIKEEGYLCEWGPNGFLDSKPQTLDLCRELGASDLLLRSNDNARKRFIYTGGALNRLPENGPMFLKSGLISWPGKLRLAMEPFIPKKAGDEDETLAAFGRRRLGDEALRKLIAPMVSGIFAGNPETMSLRSCFPRIAELEDEYGSLVRAMIRLAKKKKQEVAQGKAVASAAGPGGVLTSFRDGIQALTDILAERLGPDTIVSGQEVLEVSRGGSLPWRVRTGSIDMDADLVILATPAYATASIIQGVDSDMAGILRQIPYATMTVVCFGYDRERIAHDLNGFGYLIPKEEGMNTLGTLWDSSIFENRAPEGQVLLRSMMGGACFPEYVNLTDEEVTGRVKNDLATIMGITAPPSFVRIFRHHQAIPQYTVGHSTRVAALEQRAASLPGLFLTGNSYRGIGLNDCVAAANRTAGEAIAQLTSR

SEQ ID NO: 304 - protein, 469 aa, Geobacter
MKKAIVAGGGISGLATAYLLKTRAAEEGLELDVTLVEREERLGGKIWSIKEEGYLCEWGPNGFLDSKPQTLDLCRELGASDLLLRSNDNARKRFIYTGGALNRLPENGPMFLKSGLISWPGKLRLAMEPFIPKKAGDEDETLAAFGRRRLGDEALRKLIAPMVSGIFAGNPETMSLRSCFPRIAELEDEYGSLVRAMIRLAKKKKQEVAQGKAVASAAGPGGVLTSFRDGIQALTDILAERLGPDTIVSGQEVLEVSRGGSLPWRVRTGSIDMDADLVILATPAYATASIIQGVDSDMAGILRQIPYATMTVVCFGYDRERIAHDLNGFGYLIPKEEGMNTLGTLWDSSIFENRAPEGQVLLRSMMGGACFPEYVNLTDEEVTGRVKNDLATIMGITAPPSFVRIFRHHQAIPQYTVGHSTRVAALEQRAASLPGLFLTGNSYRGIGLNDCVAAANRTAGEAIAQVTSR

SEQ ID NO: 305 - protein, 436 aa, Aquifex
MDMREVVVIGAGISGLSTAYRLKKEGVDVVVYEKDDRIGGTIHTVKEKGYLFEVGAQTILADQEVIDFLKEAGIEPVEASPSSKYRYIYKKGRLIPLPMSPVEFLKTPLLSLKTKLKVLTEIFKRGVDEDISIADFVREHFGEEFLNYVVAPFISGVYAGDPEKLSLKHATPKLYEAQKKYGSLIKAFIKEKTAGPKGKLISFGEGLGELINALAQKLEVHTENVVLRMRKFEDFFRLDVRGKKVETKSVVVASPAYTSSYLLKEVSFSASEEFDKIDYPPVVVVNVGVEGKFPKVRLLSSESGKKRILGAMFMSKLFPGRAPQGKELLTVFLGGATDREVIELSEEEIENIVERELKEILQIDCIDFMHVQKWKRAIPQYTLGYDRFLNLAQEMEKDYPGLFLTGNWLYGVSTADCIRASKKVAQKVLSFLRPQA

SEQ ID NO: 306 - protein, 470 aa, Pelobacter
MNISVVGAGISGLATAFAIQQQARRLGLEWTLDIFEKEDCSGGKIRSEKVDGYLCEWGPNGFLDSKPMTLDLCREAGLAEQLLRSNDAARKRFIFSGGRLQRVPESAADFFRSSLVSWPGKLRLAAELLVPRRKDLTDETLADFVRRRLGREALDQMVGPMAAGIFAGDPETMSLRSCFPRIHELEQQYGGLIRALLLLARKKRAERRAGKAVAGAAGPGGILTSFGGGIQELTDGLSRLLAPNLHLGDAVAAITPLKEGFSLRTHKGRVHETDIVVAAVPAMALATQVEGFSAPMAAQLRQIPYAPLQIACFGYRREALPLSLDGFGYLAARRSGMHSLGTLWSSSIFPGRAPAGYVLLRTMFGGATRPDAAQLSADEVQQRVEEDLSRSMGIKQAPDFVRIIRHTAAIPQYVSGHGARLKVLEDKAAAYPGLFLVGNAFYGVGLNDCVAAADRVASRVLTLMQQRQQA

SEQ ID NO: 307 - protein, 469 aa, Geobacter; identical to SEQ ID NO: 90

SEQ ID NO: 308 - protein, 435 aa, Cytophaga
MIAIIGAGISGLTLAYQLQQAGKPYILFESNSRPGGYINSQRFGKYLLEVGPNSILVDKKLEEFIHELNLDKLFEPAAIINKNRFIYKDANIQQVPSGPLSFLTGRFFSAKTKYAIFKELFNKSISKENETVYDFFARRFSAPFTQYTIDPFATGVYAGDIKQLLIEETFPQLVELEKQYGSIIKGIFKKGFGEKRKTGTFVHGLQTLTDTLAAQLHSLQLNTRVLNLRKQMDKIVLTTDTKHGIEELTFDKVVVCGTTFQAATLIKDSYPDLSAILSQVQYASMKAVFAAFKRTDVTHPMNGFGCLYPSAEQSFLAGTIWNSSIFNDRCPADEVLTTSFIGGMHHPEYTALSESELEQRAIQQLSKDLGITGKPTFTHVAGWNKAIPQYDIYLKKARLASKLLSDDHIYFRSNWTNGISLGNCIQSARDLALIL

SEQ ID NO: 309 - protein, 471 aa, Geobacter
MKKAIIVGGGITGLATAWLLREKAKKAGMELEIALLEKEERVGGKIRSIKADGYLCEWGPNGFLDNKPQTLDLCRDLQADSQLLRSNDNARKRFIYSEGFLHQLPENGPSFFKSKLISWPGKLRLALEPTPFIAKAPDGVDETLAAFGRRRLGDEALRKLIAPMVSGIFAGDPETMSLQSCFPRIAELEREYGGLVMAMVKLAKKKKQELAEGKAVASAAGPGGILTSFRDGLQTLTEIIRGQLGCEVLSVGEEVVRIRKGSSVPYRVETTSRELDADVVVLATPAYATGQMLEGLDSAMTGILGQIPYATMSVVCLGYEQDKISHDLNGFGYLIPKGEGMNILGTLWDSSIFENRAPQGRVLLRSMMGGACFPEYIKLSDEEVQRRVCDNLKTIMGIAAPPDFVRIFRHEKAIPQYTVGHGKRLQALLDAGRNHQGLLLTGNSYRGIGLNDCVAAAVRSSNEVMEHLQKR

SEQ ID NO: 310 - protein, 465 aa, Porphyromonas
MDHLTVIIGAGLTGLTTAAFLRAAGRPVLVLERAAHIGGQIRTYREDGFVFETGPNTGTISSPEVAELFELLGLEPEIATPAASNRLIWKGNKLYPLPRNIAEAVATPLFSLWDKWRILGEPFRRRGGQPNETVGALARRRLGKSFVDYAVDPFLGGIYAGDPDQLVTRFALPKLYDLEQRYGSFVLGAVRKARQPQSERDRKASRKVFSVQGGLGLLVEALADYIGREHILTETQIRYINHPGAHTFGLTYTDASEEEHTIPCRHLVSTVAAHHIPTLFDHFPADESAVFEQLYYAPMIEVAVGFRRNVATHLPAFGCLIPSRENRRILGILFPSDCFRGRAPEGGALYSIFMGGVRNASLIDLSDEEISTIAMEELRDMLRIPHTCKPDLLHISRHRHAIPQYYADTELRQDIIRRMEMRWPGLHLGGNMHGGIGMAHRISQGVEMARSIIEETAIAERSARG

SEQ ID NO: 311 - protein, 464 aa, Corallococcus
MTVAVIGGGITGLALAYQLRARGTDAVVLESTSRVGGNVQTHARGGYLLEAGPNSFLDREPTTRELADALGVSSRIRPADVAAKNRYVFTRGALRALPTSPPAFLKSDILPLASRLRVVGELFSGRNPTGADESLAQLGRRHLGREATAVLLDAMQTGTYAGDPEQLSAEATFPQLVKFEREHRSLILGAIRAQRAARQAKGAVETGPRLTGQMSTFDGGLGVLVDALAKALGDSVRTDAKVEGLERAADGWTVRYQQRGQPAELSASHVVLAVPAHVAASLVRPLDAELAQKADAIPYAPIAVVHLGFAPGTVPKPDGFGFLVPAVEGTAMLGTIHVSTTFPFRVEGGRVLLTCLMGGARRPEVVSRDEDALVALAREELKAMAGLTATPELTAVFRWPRGIPQYTVGHLERLAAMEERLKRWPGLHLAGNAYRGVGVNDCLKEAARLAEALGGPAAGATRSA

SEQ ID NO: 312 - protein, 454 aa, Calditerrivibrio
MRVAIIGGGISGISTAFLLENLKNELNLDMEITIIEKRLRWGGSIETSREDGFIVEAGPNGFLDSKPHTLELLSMAGLSNNLVKSNDLARKRYIMRNGILHRLPENPPMFFKTKLLSFSAKMRILSEYFIQKSVLEDESVADFARRRLGKEALEYLISPMVSGIFAGDPEKMSLRSCFPVIRDLEINYGGLFKGMIKKKGKKSGPSGPGGILTSYKNGLDNMITDLLESTSITKMLNTEVFSIDKKINRYILNTNKGIMEFDKIFINAPAYAVSQMLSVLDKDLSRDLNNITYPPVFVAGFIFKPEDLEDPLDGFGYLIPHSENKRILGALFDSSIFPDRTRDGYKIVRTIMGGDKNRWIIEKSDDELIRMAFDDIKETLKIKREPYKIKYFRWEKAIPQYYIGHHKIVEKVEEFYKKFDDIFIGGNILYGVGINDCTRTSFMNVDRFKNLLNK

SEQ ID NO: 313 - protein, 465 aa, Porphyromonas
MDHLTVIIGAGLTGLTTAAFLRAAGRPVLVLERAAHIGGQIRTYREDGFVFETGPNTGTISSPEVAELFELLGLEPEIATPAASNRLIWKGNKLYPLPRNIAEAVGTPLFSLWDKWRILGEPFRRRGGQPNETVGALARRRLGKSFVDYAVDPFLGGIYAGDPDQLVTRFALPKLYDLEQRYGSFVLGAVRKARQPQSERDRKASRKVFSVQGGLGLLVEALADYIGREHILTETQIRYINHPGAHTFGLTYTDASEEEHTIPCRHLVSTVAAHHIPTLFDHFPADESAVFEQLYYAPMIEVAVGFRRNVATHLPAFGCLIPSRENRRILGILFPSDCFRGRAPEGGALYSIFMGGVRNASLIDLSDEEISTIAMEELRDMLHIPHTCKPDLLHISRHRHAIPQYYADTELRQDIIRRMEMRWPGLHLGGNMHGGIGMAHRISQGVEMARSIIEETAIAERSARG

SEQ ID NO: 314 - protein, 454 aa, Stigmatella
MAVIAVVGGGITGLALAHRLRSRGKDAVVLEAGAHLGGVIQTRQRDGFSTETGPNSFLDREPATRELAASLGIEERIRMADPSAKSRSLYTRGQLRPVPASPPAFLKSDLLPLGTRLRVLAELFTGRAPPGQDESLGDFGRRHVGARATSVLLDAMQTGTYAGDVEALSAEAAFPTLKQLEREHRSLLLGAVRTQGRQRAPAPAGTKLKGAMCTFEGGLGTLVEALARALGPAARTGAAVEGLARSQNGWRLSVRERGQQAELEASQVVLTSPAHVSAELLAPLDPSLAGHLKGIPYAPIAVVHLGFAPGKTPPPDGFGFLVPGQEQRQLLGVIHVSTVFPFRAEGGRVLYTCLMGGARRPDLVGLNEEALAALAQQELREMAGVTASPDFTEAVRWPRGIPQYTVGHLERLSAIDSALARLPGLHLAGNAYKGVGLNDCIRNAAALAETLASR

SEQ ID NO: 315 - protein, 465 aa, Porphyromonas
MDHLTVIIGAGLTGLTTAAFLRAAGRPVLVLERAAHIGGQIRTYRENGFVFETGPNTGTISSPEVAELFELLGLEPEIATPAASNRLIWKGNKLYPLPRNIAEAVATPLFSLWDKWRILGEPFRRRGGQPNETVGALARRRLGKSFVDYAVDPFLGGIYAGDADQLVTRFALPKLYDLEQRYGSFVLGAVRKARQPQNERDRKASRKVFSVQGGLGLLVEALADYIGREHILTETQIRYINHPGAHTFGLTYTDASEEEHTIPCRHLVSTVAAHHIPTLFDRFPADESAVFEQLYYAPMIEVAVGFRRNVATHLPAFGCLIPSRENRRILGILFPSDCFRGRAPEGGALYSIFMGGVRNASLIDLSDEEISTIAMEELRDMLHIPHTCKPDLLHISRHRHAIPQYYADTELRQDIIRRMEMRWPGLHLGGNMHGGIGMAHRISQGVEMARSIIEETAIAERSARG

SEQ ID NO: 316 - protein, 462 aa, Leptospirillum
MSTVFRCDVLIVGGGISGLAAAMVLHQAGKNILLVESRGYLGGAIRSVEDSGYLLEMGPNSMMLGPEDPINVWLDKLGLSEKLLKASPEAQNRYVWCQGKLIPVPLSPSSFLTTPLFSLSEKMRVAKEFFISPGSGLPEGSDETVGHFVRRRLGNEFLEKLIDPFVKGVYASHPDLLSLNSAFPLLARLEQESGGLIRGAIRLSREKKRKKANLTGPPGGLYSFSGGLGEMVRAFSGYLKDESLIHGELIHWNRLPSGEFQCVLLQDEERVEVISQKMILATSPADAGRILEKNQPEIASVLSSIPMAPIAIAYIGVDRKALPGYLPGFGVLFPTSEKRKILGIIQNSDLFPNRSPDGKVLLTIFAGGMLSPKIAMSFDEDFEQIVLGELKTVFGLDSRPEFFRIQRWAEGISQYSPGHASRIQRIRDLTPEGMILTGNYLGGISVLKTFTNGLEAGKAFLS

SEQ ID NO: 317 - protein, 454 aa, Spirosoma
MTIGIIGAGISGLTLAYELQRRGIAYHLWEAAGQAGGYIRSQRDWPDGPSGRNYLRELGPNSLLGDAELLNWLDELGLTPELTFSQPVSKARFIFRDGKYRQLPSGPPSLLFGNFFSWKTKLAILRERNNKTVSPPGETLGQFFRRRFSSEIVDYALGPFVAGIYAGDPEQLLVSETFPSLLQYEKEYGSVLRGLIKSQSAGGSAIGRRQSFSFREGMQMLPNALAAKLTNLSLNEAVSSISPTPNGWEVETNTGTTTVDKLVLAVGTDAAARLVDQRYPDLARTLQAITYPPMTAVHSAYKRADVRHPLNGFGGLNPAVEGRFAAGHIWSSSIFTGRCPDDEVLFTTFVGGQTGAHNTRHPDSVLAHNVHKELVDGFGITAATPVYQSVFRWERAIPQYDATLASAKESVKAMEADQLFVCANWYGGVSLSDCIGKSRKLADQLAVKPFIKNF

SEQ ID NO: 318 - protein, 495 aa, Candidatus
MATEQHSGSRRIVVVGSGIAGLAAAYRLQERCEQDGPPCEVRVLEAAARPGGAISTTHRDGFVLESGPDTIFTDKPWGLDLIRRLGLSEQVIGTNEAHRRTFVVRDGALHPLPEGFALMGPTKPWPFLQSGLLSWRGKARAALDLVLPRGGPSDDESLASFVRRRFGQEFLDRLAQPMIGGIYGADPERLSLRATFPQFLQMEATHRSVILGLRRMRPAGRGVGHTSSGPRYGLFVTLDHGLQALVDAMVKRLPAGTLRLRAPVDRIAHTEQGWTVRLGDGASLQADGLILAVPAFEIARLTHDLDQDLARQLEAMPYASSVTINLAYRREAIHHPLDGFGFVVPACEGRTIIACSFSSVKFAHRAPAGHVLLRAFAGGALQPEPFTWDDETLLSAVRRDLEELLAIHAPPLWSQLVRHPRVMPQYQVGHLGRLAALEETLRRWPTLKLTGNAYRGVGVPDVVHSGETAADSLLAELAPSPTEPTPACTEGDSRL

SEQ ID NO: 319 - protein, 469 aa, Pelobacter
MKRAIIVGGGISGLATAWLLREKALACGIQLELVLLEKDQRPGGKIRSIHEGGYVCEWGPNGFLDSKPQTLELCDAVGVSSDLLRSNDNARKRFIYSDGELHRLPEGGGTFLKSRLISWPGKLRLALEPTPFIARTPAGVDESLADFARRRLGGEALDKLISPMVSGIFAGDPETMSLVSCFPRIAQLEREYGGLIRAMVRLARQKKRERAAGKAVSSAAGPGGVLTSFRPGIQYLTDSLAASLGGIVMADREVSWVRRGKSAAWRVGCRDGGEYDADLVIVASPAHAASAILHDCDAGIASILESIPYASMTVVCLGYERELVSHPLDGFGYLIPKKEGRSILGTLWDSSMFENRAPTGKVLLRSMVGGACFPDYVHMGDDELLGRVRGDMKDVMGIVAEPSFIRIFRHPQAIPQYTVGHGERLKHLEERLACHPGLILTGNSYRGIGLNDCVAAAQRASDQALELLR

SEQ ID NO: 320 - protein, 436 aa, Aquifex; identical to SEQ ID NO: 305

SEQ ID NO: 321 - protein, 495 aa, Candidatus; identical to SEQ ID NO: 318

SEQ ID NO: 322 - protein, 457 aa, Unknown; identical to SEQ ID NO: 67
  Unknown

SEQ ID NO: 323 - protein, 462 aa, Unknown; identical to SEQ ID NO: 74
  Unknown

SEQ ID NO: 324 - protein, 467 aa, Unknown; identical to SEQ ID NO: 26
  Unknown

SEQ ID NO: 325 - protein, 535 aa, Amaranthus; identical to SEQ ID NO: 5

SEQ ID NO: 326 - protein, 493 aa, Silene
TSDPDKLQSSAKRVAVIGAGVSGLAAAYKLKSNGLNVTLIEADERAGGKIRSAAKNGYIWDEGANTMTESESEVTSLLDDLGIRDKQQLPLSQNKRYVVRDGLPVLLPSGPISIFTSNFLSPKSKLRLLCEPFSWRRRDNAKVSDEQADESVSDFFGRHFGEEFVDYLIDPFVGGTSAADPKTISMRHSFPELWDIEDRFGSIIAGAIQSRLTPKPGEQKKPVKKTRVRGSFSFKGGMQTLVDTICERFSEDELKLKCKVLSLSYSHEGHSNNWSLSCLSNKSIEDRPYDAVVVTAPLTNVKDMKILNGGSPFSLDFVPEVDYLPVSIIVTAFKKANVERPLEGFGVLIPSKEQEKGLKTLGTLFSSMMFPDRSPADQYLYTTFVGGSRNRELARATTDELKQVVLSDLQQLLGVKGDPSFINHVYWSKAFPRYGQNYESVKMAIAKMENDLPGFFYAGNHKDGLSVGKALASGYKAADLVMSYLNSYSNTNQ

SEQ ID NO: 327 - protein, 493 aa, Silene
TSDPDKLQSSAKRVAVIGAGVSGLAAAYKLKSNGLNVTLIEADERAGGKIRSAAKNGYIWDEGANTMTESESEVTSLLDDLGIRDKQQLPLSQNKRYVVRDGLPVLLPSGPISIFTSNFLSAKSKLRLLCEPFSWRRRDNAKVSDEQADESVSDFFGRHFGEEFVDYLIDPFVGGTSAADPKTISMRHSFPELWDIEDRFGSIIAGAIQSRLTPKPGEQKKPVKKTRVCGSFSFKGGMQTLVDTICERFSEDELKLKCKVLSLSYSHEGHSNNWSLSCLSNKSIEDRPYDAVVVTAPLTNVKDMKILNGGSPFSLDFVPEVDYLPVSIIVTAFKKANVERPLEGFGVLIPSKEQEKGLKTLGTLFSSMMFPDRSPADQYLYTTFIGGSRNRELARATTDELKQVVLSDLQQLLGVKGDPSFINHVYWSKAFPRYGQNYESVKMAIAKMENDLPGFFYAGNHKDGLSVGKALASGYKAADLVMSYLNSYSNTNQ

SEQ ID NO: 328 - protein, 501 aa, Solanum; identical to SEQ ID NO: 21

SEQ ID NO: 329 - protein, 463 aa, Unknown; identical to SEQ ID NO: 87
  Unknown

SEQ ID NO: 330 - protein, 544 aa, Zea; identical to SEQ ID NO: 30

SEQ ID NO: 331 - protein, 507 aa, Oryza
MAASDDPRGGRSVAVVGAGVSGLAAAYRLRKRGVQVTVFEAADRAGGKIRTNSEGGFIWDEGANTMTESELEASRLIDDLGLQGKQQYPNSQHKRYIVKDGAPTLIPSDPIALMKSTVLSTKSKLKLFLEPFLYEKSSRRTSGKVSDEHLSESVASFFERHFGKEVVDYLIDPFVAGTSGGDPESLSIRHAFPALWNLENKYGSVIAGAILSKLSTKGDSVKTGGASPGKGRNKRVSFSFHGGMQSLIDALHNEVGDGNVKLGTEVLSLACCCDGVSSSGGWSISVDSKDAKGKDLRKNQSFDAVIMTAPLSNVQRMKFTKGGVPFVLDFLPKVDYLPLSLMVTAFKKEDVKKPLEGFGVLIPYKEQQKHGLKTLGTLFSSMMFPDRAPNDQYLYTSFIGGSHNRDLAGAPTAVLKQLVTSDLRKLLGVEGQPTFVKHVHWRNAFPLYGQNYDLVLEAIAKMENNLPGFFYAGNNKDGLAVGNVIASGSKAADLVISYLESCTDQDN

SEQ ID NO: 332 - protein, 542 aa, Setaria <grass>; identical to SEQ ID NO: 27

SEQ ID NO: 333 - protein, 507 aa, Brachypodium
MAASDDPRAAPARSVAVVGAGVSGLVAAHRLRKSGVRVTVFEADDRAGGKIRTNSDSGFLWDEGANTMTESALEASRLIDDLGLQDKQQYPNSQHKRYTVKDGAPTLIPSDPIALMKSTVLSTKSKFKLFLEPFLYEKSHTRNSQKVSDNHLSESVGSFFERHFGKEVVDYLIDPFVAGTSAGDPESLSIRHAFPGLWDLEKKYGSIIVGAILSKLTAKGDSTKKADTSSGKGRNKQASFSFHGGMQTLVEGLHKDVGDGNVKLGTQVLSLACSCDRLSASDGWSISVNSKDASSKLAAKNQLFDAVIMTAPLSNVQRMKFTKGGVPFVLDFLPKVDYLPLSLMVTAFRKEDVKRPLEGFGVLIPYKEQQKYGLKTLGTLFSSMMFPDRAPNDQHLFTTFVGGSHNRDLAAAPTAILKQLVTSDLRKLLGVEGQPTFVKHVHWKNAFPLYGHDYDLALEAIGKMENELPGFFYAGNNKDGLAVGNVIASGSKTADLVISYLESHQAR

SEQ ID NO: 334 - protein, 551 aa, Oryza
MLSPAATTTTTTSYCSYSSRAHAPTRSASAGAARFRPARAMATSDNDPRGAAPARSVAVVGAGVSGLAAAYKLRKRGVQVTVFEAADRAGGKIRTNSESGFIWDEGANTMTESESEAGRLIDDLDLQGKLQYPNSQHKRYIVKDGAPTLIPSDPIGLMKSTVLSTKSKLKLFLEPFLYEKSSKRNSGKVSDEHLSESVASFFERHFGKEVVDYLIDPFVAGTSGGDPESLSIRHAFPALWNLENKYGSVIAGAILSKLSTKGESVKTGGATPGKGRNKRVSFSFHGGMQSLIDALHNEVGDGNVKLGTEVLSLACSCDEISSSGGWSIAVDSRDAKGKDLRKNQSFDAVIMTAPLSNVQRMKFTKNGAPFVLDFLPKVDYLPLSLMVTAFKKEDVKRPLEGFGVLIPYKEQQKHGLKTLGTLFSSMMFPNRAPNDQYLYTSFIGGSHNRDLAGASTAILKQLVTSDLRKLLGIEGQPTFVKHVHWGNAFPLYGRNYDLVLEAIAKMEKNLPGFFYAGNNKDGLAVGNVIASGSKAAELVLSYLESHTDQDN

SEQ ID NO: 335 - protein, 494 aa, Picris; identical to SEQ ID NO: 38

SEQ ID NO: 336 - protein, 506 aa, Oryza; identical to SEQ ID NO: 37

SEQ ID NO: 337 - protein, 465 aa, Unknown
  Unknown
MDHLTVIIGAGLTGLTTAAFLRAAGRPVLVLERAAHIGGQIRTYREDGFVFETGPNTGTISSPEVAELFELLGLEPEIATPAASNRLIWKGNKLYPLPRNIAEAVGTPLFSLWDKWRILGEPFRRRGGQPNETVGALARRRLGKSFVDYAVDPFLGGIYAGDPDQLVTRFALPKLYDLEQRYGSFVLGAVRKARQPQSERDRKASRKVFSVQGGLGLLVEALADYIGREHILTETQIRYINHPGAHTFGLTYTDASEEEHTIPCRHLVSTVAAHHIPTLFDRFPANESAVFEQLYYAPMIEVAVGFRRNVATHLPAFGCLIPSRENRRILGILFPSDCFRGRAPEGGALYSIFMGGVRNASLIDLSDEEISTIAMEELRDMLHIPHTCKPDLLHISRHRHAIPQYYADTELRQDIIRRMEMRWPGLHLGGNMHGGIGMAHRISQGVEMARSIIEETAIAERSARG

SEQ ID NO: 338 - protein, 505 aa, Oryza; identical to SEQ ID NO: 41

SEQ ID NO: 339 - protein, 461 aa, Salinibacter; identical to SEQ ID NO: 53

SEQ ID NO: 340 - protein, 469 aa, Rhodothermus; identical to SEQ ID NO: 51

SEQ ID NO: 341 - protein, 483 aa, Tribolium <grass>
NMSLRLVLFLVFCIGKVLGNFSVIVIGAGPSGIAAATKLLQHSVNVTVLEAENRIGGRINTVKFGDGLVELGAEYCHGEVGNIVKELVNGYDLLEPNFNYLNGEIYYSNGSKLDHGFVREMQDLILSENKEENYDTRGKSIGEVFMHKYNSTLVEKYKSDENKLKLLKEGLHFAERSILISEGSFSWFDASADSDWLECPGNQTLVWKGVGYKTVLEILMKSYPNPDEKLPLDDKLFLNSKVTKINWGEKPIKVHTSDKVYSADYVIFTPSIGVLKAGSDLFTPSLPPKKHKAIDSIGFAGVVKLFLRFPVKWWDDNDKYFAFFWSDDDLKSENFPEGPPEKRKIVGYPAVGLVPSWAQHQRLDDLDLGEMVPEIEQLPIETLKKGVNFTLEKFLGKDYNITEIGEVLRSGWVTNENFRGTYSFTRNGLYQKGVSYQNDLAEPLEGLFFAGEATNPVHFATVHGAIESGHREARRILDPRNKN

SEQ ID NO: 342 - protein, 453 aa, Tribolium <grass>
SVIIVGAGVSGISAAVKLFENGIANLKIFEAEDRIGGRIHTVKFGDNFIDLGAQYCHGENVVYDTVKDLDLLEHAQLFSTPKMYYSNGSHLDNQLTQDLQKVVSSYDHDITRSKELSLGDAFLKKYNSTILEKYKNDPENFKLASDGLTFAHSTILMHEGAFHWSRPASGRHYKAVKGDQMMVWKQRGYDMILDVLLKRYPDPSLKIPIEEKLFLNKRVTKITWTGDKASVKLSDGTSHEADHVIFTPSVGVLTHDDLFEPVVPPRKQQAIKSMGFDGIIKLILYFPEKWWHDSDSTFFFLWDRKDLEGITKEFNEGPSKDGISWVSNLVALVKVPSNPHVLIGWVSGGLIPEMEKMSLDVVKKGSMFVIRKFLGRDYNVTEPGEVLWSDWHNNPNFRGTYSYEKNGYFEEEVHYQDHLAEPLTQGTTPVVLFAGEATHPTHYSTVHGAIESG

SEQ ID NO: 343 - protein, 612 aa, Mycosphaerella
MASSSSPNHGKKAIVIGAGVGGVSTAARLAAAGFSVTVLEKNSFTGGRCSLIHHDGYRFDQGPSLLLLPHLFHATFADLGTTLEKEGVHLLKCEPNYNIHFGDGEKFTLSTDLSVMKEEIEKWEGKDGYDRYLAFLRESHAHYELSVTHVLLKNFTSLLSMLRISFLQHLVALHPFESIWSRASRYFWTERLRRVFTFGSMYMGMSPFDAPGTYSLLQYTELAEGIWYPVGGFHKVVGALVGIAERMGAEFRLETAVKRICVTADGARATGVELENGEVLEADVVVNNSDLVYAYNHLLQPQAYAESLSDRPGSCSSISFYWALDRKVPELSAHNIFLADDYRESFDSIFKKHLIPDQPSFYVNVPSRVDSTAAPEGKDTVVVLVPVGHLTGEAAASHFSQPASSPSKPNGGTIKSASPSTQTGIPPTLDQDWPAMIALARQTIIKTIHHRTGVDLHPLIIHEQSNDPVTWRSAFNLDKGAILGLSHSFFNVLCFRPSTRARRAGPLDPLLKYLSGLYMVGASAHPGTGVPIVLAGGKLVAEQVCGDMGVRVPWVVEEGRGKGKEEVKKLDRMEKPETWVKWVGILIALGMVPWILGWVVVLFLAKVASVGW

SEQ ID NO: 344 - protein, 936 aa, Mycosphaerella
MSIDTEEATCQVPVELSAGSESEEELNDIAEHELEDDFDPHFHREGQATPMVDIAGPASESQHQQPPAFSRWVSKLRRKRHNHPQLLSPRKERWTLDDFDTRAASPGQQYLSPGRHYHSDSQGSSVRFVTAVRSATATLASASMATLSRRTTRFRRGHQRSSIVSGSEIRLSIESRRSIIDEAAKQRARKRREKLEELIRTEESYVADVKALSNAYFTILAHQPTATSFARTSTQRTIADILHLHDDILGCLHRIVPFAEYDQTIARLPLPLRAHNRWHSMDAVPQRTTPNRSTLATIRQGRRSLNISRSSSDDAQVVLRCSPQTIAAVAKAFSDNMLRFAAYEDYGANYDLIQRDVDDTQRAISGWADFDKAIEAISAHVNPMRTREANRKRAMTVKDLLIKPIQRLPRYELLFSDLHKLTPACDDPISHAEIEELRLKLNSVCHRMNAAKENPARARALEMTWLIGDRLTFSSQVPRSIFLQLLGRVSLCGSLYIAYRSRDRIKGAYVICVLFESCLLLASCDEDQSKYSILVSITLANATIEETDNAKGLQCHTAPHAWKVVFEQGARMYELIFTACSAVESEVWRTHIASGIETQIAAVAEGKANVFELQSPLTADMKSIGKAFGKPGSFVRRMSVQRAATIGPTADLNQVIIKNTQAVKEVMDNSSQGSFQIPRSQSVATPSHVQTLAPRRADRHRLETILSDVWSRDLLPYPGMVRRSDPIRAGANHVIRKFSMASITSNFSSSKRTGSYTSMSSWRKEDMPPPRNRGESGREGSSMSSRQSRPPLIDFHTAPDAFLPADFEIGRPSKDKRKRSALRTFTMTMERPFTPLLGNENKQSGLRRAQSVKDVVDDQARPGPSPIQLKRREEKRTGTPVYSVVQERARTPAMLHVKDESLEMGMGVGEASNGAVAGKAPRKSKSRLLRLFGQER

SEQ ID NO: 345 - protein, 573 aa, Mycosphaerella
MLHSRSCTYRLLAPAVARRITPLVPSQCLLQTHRSRTYSAEAAPSHDVAVLGGGITGLAAAHYVTREHPRAKVTLYEASDRVGGWVSSKRADVHDGTVLFEGGPRTLRPNGNGVLAANASQMQELDLTKDAIFTQKSSPAAQNRFVYYPDHIVRMPHPSAGLFNNLWSLMTEPVFATALKSGFMEAFTTGRDGSIQDESIAEFFSRRLSPTMVDRILSAVIHGIYAGDVNKLSAKSLFPNQWRHEAKYDSLIKGVIQERAEGTMVTKREADFLQAMKVFEWDPLLKATLKDNSVFTFKDGLQMLPDRLHSRLFEDGRVEFKTGSPVESIVQSQGNSGIQVTTKGSTESKTHTHVISALSPEHLNTVCRHGSASSRLIDSIPTVTVMTVSMYFRTPDLHEPGFGYLIPQATPFENNPERALGVVFDTAYSPGSSDSRGTKVTVMLGGHWWDGWPAFPDEEEGVTMARAVLERHLGIKEAPEAWQVNLQADCIPQYTVGHETRLKKAHNNIWQEYKGRLRVAGNWMSGVGVNDCLRSAYEVARNLSKDGTGLQHVGEAPTLRMKPVRPGEKTEES

SEQ ID NO: 346 - protein, 239 aa, Apisum
KREGGIEKNQSIQIIEASDHTGGWIQSWKDENTNVISELGPRTIRGRGKSANNTYSLIKDLGIEDLVRNVGIDASARYIFANGNIHQLPMSVWKALFTVNQPFTKPWIYYVLRECFSSNNSKDKLSDVQNNDESAYDFFCRTFGQEFADYLISPLLCGVCGGNAKQMSVKFMFGALYEAERKHGTVGLGLLKEQLSSIWNREKVKDTKGTNTVKPPPSVYYLDGGLQRLIHALDIENES

SEQ ID NO: 347 - protein, 502 aa, Schizophyllum
MAPHHIAVLGGGLTGLSSAYHLSHRFPNALITLVERSTRVGGWAESERVSLKDPKDGSEASILIEGGPRTLRPTAKSVLELVTRLDLLDDLILVPRTSPSAKNKYFHMPGQPGLLAVPSSFKGLISSPLGACLTRAVAKEAMAFSNRDDLKDESFDSFLCRRFTAEFAEKVGSALVHGIFAADSRKLSVRAAFPVLWEAEEYGWGSVVRGFIRGRREEDVEESYYISNPVQKAMEETAVFSFRNGMDTVARATEHHLSKLKNVTILKGADVKSLGVNSKDKSIEVQIRPTHVVSTLPLPALHRVLTPTSNLPHLTTNPYSTVTVYNLIFRTDTPTPIHPAGFGYLIPRPPGGYEQPQANKEGILGCVFDSCALSAQDVMPGPTKYTKMTVMTGGPYQNKPPALDTVLQALARHLDWPEVYEPVYTRVRENRDCIPVPAPGHLERVAELRRVLKEGEWQGRMEVVGAGVGGVSVGDCVEAGRWVGEGWGPSTPQMEDDECDDE

SEQ ID NO: 348 - protein, 150 aa, Acinetobacter
MDAPSDAFLWVKALHIIAVVCWFAALFYLPRLYVYHAMSEDDTSHRRFEVMERKLYRGIMWPSMIATLITAHFLVDWGDATRHYHEALWFYIKVGLVGLLVIYHFVCGYYRKKLIGNAHYKSHKFWRYFNEMPTLILFAVVILVVVKPQF

SEQ ID NO: 349 - protein, 150 aa, Acinetobacter
MDAPSDAFLWVKALHIIAVVCWFAALFYLPRLYVYHAMSEDEISHRRFEIMERKLYRGIMWPSMIATLITAHFLVDWGDATRHYHEALWFYIKVGLVGLLVIYHFVCGYYRKKLIGNAHYKSHKFWRYFNEMPTLILFAVVILVVVKPQF

SEQ ID NO: 350 - protein, 150 aa, Acinetobacter
MDAPSDAFLWVKALHIIAVVCWFAALFYLPRLYVYHAMSEDEISHRRFEIMERKLYRGIMWPSMIATLITAHFLVDWGDATRHYHQALWFYIKVGLVGLLVIYHFVCGYYRKKLIGNAHYKSHKFWRYFNEMPTLILFAVVILVVVKPQF

SEQ ID NO: 351 - protein, 150 aa, Acinetobacter
MDAPSDAFLWVKALHIIAVVCWFAALFYLPRLYVYHAMSEDTVSHQRFEVMERKLYRGIMWPSMIATLITAHFLVDWGDATRHYHEALWFYLKVGLVGLLVIYHFVCGYYRKKLIGNAHYKSHKFWRFFNEMPTLILFAVVILVVVKPQF

SEQ ID NO: 352 - protein, 150 aa, Acinetobacter
MDAPSDAFLWVKALHIIAVVCWFAALFYLPRLYVYHAMSEDAVSHQRFEVMERKLYRGIMWPSMIATLITAHFLVDWGDATRHYHEALWFYLKVGLVGLLVIYHFVCGYYRKKLIGNAHYKSHKFWRFFNEMPTLILFAVVILVVVKPQF

SEQ ID NO: 353 - protein, 150 aa, Acinetobacter
MDAPSDAFLWVKALHIIAVVCWFAALFYLPRLYVYHAMSEDAVSHQRFEVMERKLYRGIMWPSMIATLITAHFLVDWGDATRHYHEALWFYLKVGMVGLLVIYHFVCGYYRKKLIGNAHYKSHKFWRFFNEMPTLILFAVVILVVVKPQF

SEQ ID NO: 354 - protein, 150 aa, Acinetobacter
MDAPSDAFLWVKALHIIAVVCWFAALFYLPRLYVYHAMSEDVVSHQRFEVMERKLYRGIMWPSMIATLITAHFLVDWGDATRHYHEALWFYLKVGLVGLLVIYHFVCGYYRKKLIGNAHYKSHKFWRFFNEMPTLILFAVVILVVVKPQF

SEQ ID NO: 355 - protein, 150 aa, Acinetobacter
MDAPSDAFLWVKALHIIAVVCWFAALFYLPRLFVYHAMSEDTVSHQRFEVMERKLYRGIMWPSMIATLITAHFLVDWGDATRHYHEALWFYLKVGLVGLLVIYHFVCGYYRKKLIGNAHYKSHKFWRFFNEMPTLILFAVVILVVVKPQF

SEQ ID NO: 356 - protein, 150 aa, Acinetobacter
MDAPSDAFLWVKALHIIAVVCWFAALFYLPRLYVYHAMSEDAVSHQRFEVMERKLYRGIMWPSMIATLITAHFLVDWGDASRHYHEALWFYLKVGLVGLLVIYHFVCGYYRKKLIGNAHYKSHKFWRFFNEMPTLILFAVVILVVVKPQF

SEQ ID NO: 357 - protein, 150 aa, Acinetobacter
MDAPSDAFLWVKALHIIAVVCWFAALFYLPRLFVYHAMSEDAVSHQRFEVMERKLYRGIMWPSMIATLITAHFLVDWGDATRHYHEALWFYLKVGLVGLLVIYHFVCGYYRKKLIGNAHYKSHKFWRFFNEMPTLILFAVVILVVVKPQF

SEQ ID NO: 358 - protein, 150 aa, Acinetobacter
MDAPSDAFLWVKALHIIAVVCWFAALFYLPRLFVYHAMSEDAVSHQRFEVMERKLYRGIMWPSMIATLITAHFLVDWGDATRHYHEALWFYLKVGLVGLLVIYHFICGYYRKKLIGNAHYKSHKFWRFFNEMPTLILFAVVILVVVKPQF

SEQ ID NO: 359 - protein, 150 aa, Acinetobacter
MDAPSDAFLWVKALHIIAVVCWFAALFYLPRLYVYHAMSEDAVSHQRFEVMERKLYRGIMWPSMIATLITAHFLVDWGDATRHYHEALWFYLKVGLVGLLVIYHLVCGYYRKKLIGNAHYKSHKFWRFFNEMPTLILFAVVILVVVKPQF

SEQ ID NO: 360 - protein, 150 aa, Acinetobacter
MDAPSDAFLWVKALHIIAVVCWFAALFYLPRLFVYHAMSEDAVSHQRFEVMERKLYRGIMWPSMIATLITAHFLVDWGDASRHYHEALWFYLKVGLVGLLVIYHFVCGYYRKKLIGNAHYKSHKFWRFFNEMPTLILFAVVILVVVKPQF

SEQ ID NO: 361 - protein, 150 aa, Acinetobacter
MDAPSDAFLWVKALHIIAVVCWFAALFYLPRLYVYHAMSEDAVSHQRFEVMERKLYRGIMWPSMIATLITAHFLVDWGDATRHYHEALWFYLKVGLVGLLVIYHLVCGYYRKKLIGNAHYKTHKFWRFFNEMPTLILFAVVILVVVKPQF

SEQ ID NO: 362 - protein, 150 aa, Acinetobacter
MDAPSDAFLWVKALHIIAVVCWFAALFYLPRLFVYHAMSEDALSHQRFEVMERKLYRGIMWPSMIATLITAHFLVDWGDATRHYHDALWFYLKVGLVGLLVIYHFVCGYYRKKLIGNAHYKSHKFWRFFNEMPTLILFAVVILVVVKPQF

SEQ ID NO: 363 - protein, 150 aa, Acinetobacter
MDAPSDAFLWVKALHIIAVVCWFAALFYLPRLYVYHAMSEDAISHQRFEVMERKLYRGIMWPSMIATLITAHFLVDWGDATRHYHEALWFYLKVGLVGLLVIYHLVCGYYRKKLIGNAHYKTHKFWRFFNEMPTLILFAVVILVVVKPQF

SEQ ID NO: 364 - protein, 150 aa, Acinetobacter
MDAPSDAFLWVKALHIIAVVCWFAALFYLPRLYVYHAMSEDKVSHQRFEVMERKLYRGIMWPSMLATLITAHFLVDWGDATRHYHEALWFYLKVGLVGLLVIYHFVCGYYRKKLISNAHYKSHQFWRFFNEMPTLILFAVVILVVVKPQF

SEQ ID NO: 365 - protein, 150 aa, Acinetobacter
MDAPSDAFLWVKALHIIAVVCWFAALFYLPRLYVYHAMSEDEISHQRFEVMERKLYRGIMWPSMIATLVTAHFLVEWGDATRHYHEAIWFYLKVGLVGLLVIYHFVCGYYRKKLIGNAHYKSHKFWRFFNEMPTLLLFAIIILVVVKPQF

SEQ ID NO: 366 - protein, 150 aa, Acinetobacter
MDAPSDAFLWVKALHIIAVVCWFAALFYLPRLYVYHAMSEDAISHQRFEVMERKLYRGIMWPSMIATLVTAHFLVEWGDATRHYHEALWFYLKVGLVGLLVIYHFVCGYYRKKLIGNAHYKSHKFWRFFNEMPTLLLFAIIILVVVKPQF

SEQ ID NO: 367 - protein, 150 aa, Acinetobacter
MDAPSDAFLWVKALHIIAVVCWFAALFYLPRLYVYHAMSDDAVSHQRFEVMERKLYRGIMWPSMIATLITAHFLVDWGDATRHYHEALWFYLKVGLVGLLVIYHFVCGYYRKKLIGNAHYKSHKFWRFFNEMPTLILFAVVILVVVKPTF

SEQ ID NO: 368 - protein, 150 aa, Acinetobacter
MDAPSDAFLWVKALHIIAVVCWFAALFYLPRLYVYHAMSEDAISHQRFEVMERKLYRGIMWPSMIATLLTAHFLVDWGDATRHYHEALWFYMKVGLVGLLVIYHFVCGYYRKKLIGNAHYKSHRFWRFFNEMPTLLLFAIIILVVVKPQF

SEQ ID NO: 369 - protein, 150 aa, Acinetobacter
MDAPSDAFLWVKALHIIAVVCWFAALFYLPRLYVYHAMSEDAVSHQRFEVMERKLYRGIMWPSMIATLITAHFLVDWGDATRHYHDALWFYLKVGLVGLLVIYHFVCGYYRKKLIGHAHYKSHKFWRFFNEMPTLILFAVVILVVVKPQF

SEQ ID NO: 370 - protein, 150 aa, Acinetobacter
MDAPSEAFLWVKALHIIAVVCWFAALFYLPRLYVYHAMSEDTVSHQRFEIMERKLYRGIMWPSMIATLITAHFLVDWGDATRHYHEALWFYLKVGLVGLLVIYHFVCGYYRKKLIGNAHYKSHKFWRFFNEMPTLILFAVIILVVVKPTF

SEQ ID NO: 371 - protein, 150 aa, Acinetobacter
MDAPSDAFLWVKALHIIAVVCWFAALFYLPRLYVYHAMSEDAISHQRFEVMERKLYRGIMWPSMIATLVTAHFLVEWGDATRHYHEAIWFYLKVGLVGLLVIYHFVCGYYRKKLIGNAHYKSHKFWRFFNEMPTLLLFAIIILVVVKPQF

SEQ ID NO: 372 - protein, 150 aa, Acinetobacter
MDAPSDAFLWVKALHIIAVVCWFAALFYLPRLYVYHAMSDDATSHQRFEVMERKLYRGIMWPSMIATLITAHFLVDWGDATRHYHEATWFYLKVGLVALLVIYHLVCGYYRKKLIGNAHYKSHKFWRFFNEMPTLILFAVVILVVVKPQF

SEQ ID NO: 373 - protein, 150 aa, Acinetobacter
MDAPSDAFLWVKALHIIAVVCWFAALFYLPRLYVYHAMSEDAVSHQRFEVMERKLYRGIMWPSMIATLVTAHFLVDWGDATRHYHDALWFYLKVGLVGLLVIYHLVCGYYRKKLIGNAHYKSHRFWRFFNEMPTLILFAVVILVVVKPQF

SEQ ID NO: 374 - protein, 150 aa, Acinetobacter
MDAPSDAFLWVKALHIIAVVCWFAALFYLPRLYVYHAMSEDAVSHQRFEVMERKLYRGIMWPAMLATLITAHFLVDWGDATRHYHEALWFYLKVGLVGLLVIYHLVCGYYRKKLIGNAHYKSHKFWRYFNEMPTLILFAVVILVVVKPTF

SEQ ID NO: 375 - protein, 150 aa, Acinetobacter
MDAPSDAFLWVKALHIIAVVCWFAALFYLPRLFVYHAMSEDALSHQRFEVMERKLYRGIMWPSMIATLITAHFLVDWGDATRHYHDALWFYLKVGLVGLLVIYHLVCGYYRKKLIGNAHYKSHKFWRFFNEMPTLILFAVVILVVVKPQF

SEQ ID NO: 376 - protein, 150 aa, Acinetobacter
MDAPSDAFLWVKALHIIAVVCWFAALFYLPRLYVYHAMSEDAASHQRFEVMERKLYRGIMWPSMIATLITAHFLVDWGDATRHYHEATWFYLKVGLVALLVIYHLVCGYYRKKLIGNAHYKSHKFWRFFNEMPTLILFAVVILVVVKPQF

SEQ ID NO: 377 - protein, 150 aa, Acinetobacter
MDAPSDAFLWVKALHIIAVVCWFAALFYLPRLYVYHAMSEDEISHQRFEVMERKLYRGIMWPSMIATLVTAHLLVEWGDATRHYHEAIWFYLKVGLVGLLVIYHFVCGYYRKKLIGNAHYKSHKFWRFFNEMPTLLLFAIIILVVVKPQF

SEQ ID NO: 378 - protein, 150 aa, Acinetobacter
MDAPSDAFLWVKALHIIAVVCWFAALFYLPRLYVYHAMSDDATSHQRFEVMERKLYRGIMWPSMIATLITAHFLVEWGDATRHYHEATWFYLKIGLVALLVVYHFVCGYYRKKLIGNAHYKSHKFWRFFNEMPTLILFAVVILVVVKPQF

SEQ ID NO: 379 - protein, 150 aa, Unknown
  Bacteria
MDAPSDAFLWVKALHIIAVVCWFAALFYLPRLYVYHAMSDDAVSHQRFEVMERKLYRGIMWPAMIATLITAHFLVDWGDATRHYHEALWFYLKVGLVGLLVIYHFVCGYYRKKLIGNAHYKSHKFWRFFNEMPTLILFAVVILVVVKPTF

SEQ ID NO: 380 - protein, 150 aa, Acinetobacter
MDAPSDAFLWVKALHIIAVVCWFAALFYLPRLYVYHAMSEDAISHQRFEVMERKLYRGIMWPAMLATLITAHFLVDWGDATRHYHEALWFYLKVGLVGLLVIYHLVCGYYRKKLIGNAHYKSHKFWRYFNEMPTLILFAVVILVVVKPTF

SEQ ID NO: 381 - protein, 150 aa, Acinetobacter
MDAPSDAFLWVKALHIIAVVCWFAALFYLPRLYVYHAMSDDATSHQRFEIMERKLYRGIMWPSMIATLITAHFLVDWGDATRHYHEATWFYLKVGLVALLVIYHLVCGYYRKKLIGNAHYKSHKFWRFFNEMPTLILFAVVILVVVKPQF

SEQ ID NO: 382 - protein, 150 aa, Acinetobacter
MDAPSDAFLWVKALHIIAVVCWFAALFYLPRLYVYHAMSEDAVSHQRFEVMERKLYRGIMWPSMIATLVTAHFLVDWGDATRHYHEALWFYLKVALVGLLVIYHLVCGYYRKKLIGNAHYKSHKFWRFFNEMPTVILFAVVILVVVKPQF

SEQ ID NO: 383 - protein, 150 aa, Acinetobacter
MDAPSDAFLWVKALHIIAVVCWFAALFYLPRLYVYHAMSDDTVSHQRFEVMERKLYRGIMWPSMVATLITAHFLVDWGDATRHYHEALWFYIKVALVGLLVIYHFVCGYYRKKLIGNAHYKSHKFWRFFNEMPTLILFAVVILVVVKPHF

SEQ ID NO: 384 - protein, 150 aa, Acinetobacter
MDAPSDAFLWVKALHIIAVVCWFAALFYLPRLYVYHAMSEDAASHQRFEVMERKLYRGIMWPSMIATLITAHFLVDWGDATRHYHQATWFYLKVGLVALLVIYHLVCGYYRKKLIGNAHYKSHKFWRFFNEMPTLILFAVVILVVVKPQF

SEQ ID NO: 385 - protein, 150 aa, Acinetobacter
MDAPSEAFLWVKALHIIAVVCWFAALFYLPRLFVYHAMSDDNLSHQRFEIMERKLYRGIMWPSMIATLITAHFLVDWGDATRHYHEALWFYLKVGLVGLLVIYHFVCGYYRKKLIGNAHYKSHKFWRFFNEMPTLILFAVVILVVVKPTF

SEQ ID NO: 386 - protein, 150 aa, Acinetobacter
MDAPSDAFLWVKALHIIAVVCWFAALFYLPRLYVYHAMSDDATSHHRFEVMERKLYRGIMWPSMIATLITAHFLVDWGDATRHYHEATWFYLKVGLVALLVIYHLVCGYYRKKLIGNAHYKSHKFWRFFNEMPTLILFAVVILVVVKPQF

SEQ ID NO: 387 - protein, 150 aa, Acinetobacter
MDAPSDAFLWVKALHIIAVVCWFAALFYLPRLYVYHAMSDDATSHQRFEVMERKLYRGIMWPSMIATLITAHFLVEWGDATRHYHEATWFYLKVGLVALLVIYHLVCGYYRKKLIGNAHYKSHKFWRFFNEMPTLILFAVVILVVVKPQF

SEQ ID NO: 388 - protein, 150 aa, Acinetobacter
MDAPSNAFLWVKALHIIAVVCWFAALFYLPRLYVYHAMSDDATSHQRFEVMERKLYRGIMWPSMIATLITAHFLVDWGDATRHYHEATWFYLKVGLVALLVIYHLVCGYYRKKLIGNAHYKSHKFWRFFNEMPTLILFAVVILVVVKPQF

SEQ ID NO: 389 - protein, 150 aa, Acinetobacter
MDAPSDAFLWVKALHIIAVVCWFAALFYLPRLYVYHAMSEDVISHQRFEVMERKLYRGIMWPSMIATLLTAHFLVDWGDATRHYHEALWFYLKVSLVGLLVIYHFVCGYYRKKLIGNAHYKSHRFWRFFNEMPTLLLFAIIILVVVKPQF

SEQ ID NO: 390 - protein, 150 aa, Acinetobacter
MDAPSDAFLWVKALHIIAVVCWFAALFYLPRLYVYHAMSDDATSHQRFEVMERKLYRGIMWPSMIATLITAHFLVDWGDATRHYHEATWFYLKVGLVALLVIYHLVCGYYRKKLIGNAHYKSHKFWRFFNEMPTFILFAVVILVVVKPQF

SEQ ID NO: 391 - protein, 150 aa, Acinetobacter
MDAPSDAFLWVKALHIIAVVCWLAALFYLPRLYVYHAMSDDATSHQRFEVMERKLYRGIMWPSMIATLITAHFLVDWGDATRHYHEATWFYLKVGLVALLVIYHLVCGYYRKKLIGNAHYKSHKFWRFFNEMPTLILFAVVILVVVKPQF

SEQ ID NO: 392 - protein, 150 aa, Acinetobacter
MDAPSDAFLWVKALHIIAVVCWFAALFYLPRLYVYHAMSDDAVSHQRFEVMERKLYRGIMWPSMIATLITAHFLVDWGDATRHYHEALWFYLKVGLVGLLVIYHFVCGYYRKKLIGHAHYKSHKFWRFFNEMPTLILFAVVILVVVKPTF

SEQ ID NO: 393 - protein, 150 aa, Acinetobacter
MDAPSDAFLWVKALHIIAVVCWFAALFYLPRLYVYNAMSDDATSHQRFEVMERKLYRGIMWPSMIATLITAHFLVDWGDATRHYHEATWFYLKVGLVALLVIYHLVCGYYRKKLIGNAHYKSHKFWRFFNEMPTLILFAVVILVVVKPQF

SEQ ID NO: 394 - protein, 150 aa, Acinetobacter
MDAPSDAFLWVKALHIIAVVCWFAALFYLPRLYVYHAMSDDAASHQRFEVMERKLYRGIMWPSMIATLITAHFLVDWGDATRHYHEATWFYLKVGLVALLVIYHLVCGYYRKKLIGNAHYKSHKFWRFFNEMPTLILFAVVILVVVKPQF

SEQ ID NO: 395 - protein, 150 aa, Acinetobacter
MDAPSDAFLWVKALHIIAVVCWFAALFYLPRLYVYHAMSDDAASHQRFEVMERKLYRGIMWPSMIATLITAHFLVEWGDATRHYHEATWFYLKVGLVALLVVYHFVCGYYRKKLIGNAHYKSHKFWRFFNEMPTLILFAVVILVVVKPQF

SEQ ID NO: 396 - protein, 150 aa, Acinetobacter
MDAPSDAFLWVKALHIIAVVCWFAALFYLPRLYVYHAMSEDAASHQRFEVMERKLYRGIMWPSMIATLITAHFLVEWGDATRHYHEATWFYLKVGLVALLVVYHLVCGYYRKKLIGNAHYKSHKFWRFFNEMPTLILFAVVILVVVKPQF

SEQ ID NO: 397 - protein, 150 aa, Acinetobacter
MDAPSDAFLWVKALHIIAVVCWFAALFYLPRLYVYHAMSEDAVSHQRFEVMERKLYRGIMWPAMLATLITAHFLVDWGDATRHYHEALWFYLKVGLVGLLVIYHLVCGYYRKKLINNAHYKSHKFWRYFNEMPTLILFAVVILVVVKPTF

SEQ ID NO: 398 - protein, 150 aa, Acinetobacter
MDAPSDAFLWVKALHIIAVVCWFAALFYLPRLYVYHAMSEDAASHQRFEVMERKLYRGIMWPSMIATLITAHFLVEWGDATRHYHQATWFYLKVGLVALLVIYHLVCGYYRKKLIGNAHYKSHKFWRFFNEMPTLILFAVVILVVVKPQF

SEQ ID NO: 399 - protein, 150 aa, Acinetobacter
MDAPSDAFLWVKALHIIAVVCWFAALFYLQRLYVYHAMSDDATSHQRFEVMERKLYRGIMWPSMIATLITAHFLVDWGDATRHYHEATWFYLKVGLVALLVIYHLVCGYYRKKLIGNAHYKSHKFWRFFNEMPTLILFAVVILVVVKPQF

SEQ ID NO: 400 - protein, 150 aa, Acinetobacter
MDAPSEAFLWVKALHIIAVVCWFAALFYLPRLFVYHAMSDDNLSHQRFEIMERKLYRGIMWPSMIATLITAHFLVDWGDATRHYHEALWFYLKVGLVGLLVIYHFACGYYRKKLIGNAHYKSHKFWRFFNEMPTLILFAVVILVVVKPTF

SEQ ID NO: 401 - protein, 150 aa, Acinetobacter
MDAPSDAFLWVKALHIIAVVCWFAALFYLPRLYVYHAMSEDTASHQRFEVMERKLYRGIMWPSMIATLITAHFLVDWGDATRHYHQATWFYLKVGLVALLVIYHLACGYYRKKLIGNAHYKSHKFWRFFNEMPTLILFAVIILVVVKPQF

SEQ ID NO: 402 - protein, 150 aa, Acinetobacter
MDAPSDAFLWVKALHIIAVVCWFAALFYLPRLYVYHAMSEDAVSHQRFEVMERKLYRGIMWPSLIATLITAHFLVDWGDATRHYHQATWFYLKVGLVALLVIYHLVCGYYRKKLIGNAHYKSHKFWRFFNEMPTLILFAVVILVVVKPQF

SEQ ID NO: 403 - protein, 150 aa, Acinetobacter
MDAPSDAFLWVKALHIIAVVCWFAALFYLPRLYVYHAMSKDAASHQRFEVMERKLYRGIMWPSMIATLITAHFLVDWGDATRHYHQATWFYLKVGLVALLVIYHLVCGYYRKKLIGNAHYKSHKFWRFFNEMPTLILFAVVILVVVKPQF

SEQ ID NO: 404 - protein, 150 aa, Acinetobacter
MDAPSDAFLWVKALHIIAVVCWFAALFYLPRLYVYHAMSEDAVSHQRFEVMERKLYRGIMWPAMLATLITAHFLVDWGDATRHYHEALWFYLKVGLVGLLVIYHLVCGYYRKKLIDNAHYKSHKFWRYFNEMPTLILFAVVILVVVKPTF

SEQ ID NO: 405 - protein, 150 aa, Acinetobacter
MDAPSDAFLWVKALHIIAVVCWFAALFYLPRLYVYHAMSEDAASHQRFEVMERKLYRGIMWPSMIATLITAHFLVEWGDATRHYHQATWFYLKVGLVTLLVIYHLVCGYYRKKLIGNAHYKSHKFWRFFNEMPTLILFAVVILVVVKPQF

SEQ ID NO: 406 - protein, 150 aa, Acinetobacter
MDAPTDAFLWVKALHIIAVVCWFAALFYLPRLYVYHAMSEDTISHQRFEVMERKLYRGIMWPSMIATLITAHFLVDWGDATQHYHQAVWFYLKVALVALLVIYHFVCGYYRKKLIGNAHYKSHKFWRFFNEMPTLILFAVVILVVVKPQF

SEQ ID NO: 407 - protein, 150 aa, Acinetobacter
MDAPSDAFLWVKALHIIAVVCWFAALFYLPRLYVYHAMSDDATSHQRFEVMERKLYRGIMWPSMIATLITAHFLVEWGDATRHYHEATWFYLKVGLVALLVIYNLVCGYYRKKLIGNAHYKSHKFWRFFNEMPTLILFAVVILVVVKPQF

SEQ ID NO: 408 - protein, 150 aa, Acinetobacter
MDAPSDAFLWVKALHIIAVVCWFAALFYLPRLYVYHAMSDDAVSHQRFEVMERKLYRGIMWPSMIATLITAHFLVEWGDATRHYHEALWFYLKVGLVGLLVIYHFVCGYYRKKLIGHAHYKSHKFWRFFNEMPTLILFAVVILVVVKPTF

SEQ ID NO: 409 - protein, 150 aa, Acinetobacter
MDAPSDAFLWVKALHIIAVVCWFAALFYLPRLYVYHAMSEDAASHQRFEVMERKLYRGIMWPSMIATLITAHFLVEWGDATRHYHDATWFYLKVGLVALLVIYHLVCGYYRKKLIGNAHYKSHKFWRFFNEMPTLILFAVVILVVVKPQF

SEQ ID NO: 410 - protein, 150 aa, Acinetobacter
MDAPSDAFLWVKALHIIAVVCWFAALFYLPRLYVYHAMSDDAASHQRFEVMERKLYRGIMWPSMIATLITAHFLVEWGDATRHYHEATWFYLKVGLVALLVIYHLVCGYYRKKLIGNAHYKSHKFWRFFNEMPTLILFAVVILVVVKPQF

SEQ ID NO: 411 - protein, 150 aa, Acinetobacter
MDVPSDAFLWVKALHIIAVVCWFAALFYLPRLYVYHAMSDDATSHQRFEVMERKLYRGIMWPSMIATLITAHFLVEWGDATRHYHEATWFYLKVGLVALLVIYHLVCGYYRKKLIGNAHYKSHKFWRFFNEMPTLILFAVVILVVVKPQF

SEQ ID NO: 412 - protein, 150 aa, Acinetobacter
MDAPSDAFLWVKALHIIAVVCWFAALFYLPRLYVYHAMSEDTVSHQRFEVMERKLYRGIMWPAMLATLITAHFLVDWGDATRHYHEALWFYLKVGLVGLLVIYHLVCGYYRKKLIDNAHYKSHKFWRYFNEMPTLLLFAVVILVVVKPTF

SEQ ID NO: 413 - protein, 150 aa, Acinetobacter
MDAPSDAFLWVKALHIIAVVCWFAALFYLPRLYVYHAMSEDAASHQRFEVMERKLYRGIMWPSMIATLITAHFLVEWGDATRHYHQATWFYLKVGLVALLMIYHLVCGYYRKKLIGNAHYKSHKFWRFFNEMPTLILFAVVILVVVKPQF

SEQ ID NO: 414 - protein, 150 aa, Acinetobacter
MDAPSDAFLWVKALHIIAVVCWFAALFYLPRLYVYHAMSEDAVSHQRFEVMERKLYRGIMWPAMLATLITAHFLVDWGDATRHYHEALWFYLKVGLVGLLVIYHLVCGYYRKKLIDNAHYKSHKFWRYFNEMPTLLLFAVVILVVVKPTF

SEQ ID NO: 415 - protein, 150 aa, Acinetobacter
MDAPSDAFLWVKALHIIAVVCWFAALFYLPRLYVYHAMSEDAVSHQRFEVMERKLYRGIMWPSLIATLITAHFLVDWGDATRHYHQATWFYLKVGLVALLVIYHLACGYYRKKLIGNAHYKSHKFWRFFNEMPTLILFAVVILVVVKPQF

SEQ ID NO: 416 - protein, 150 aa, Acinetobacter
MDAPSDAFLWVKALHIIAVVCWFAALFYLPRLYVYHAMSEDAASHQRFEIMERKLYRGIMWPSMIATLITAHFLVEWGDATRHYHQATWFYLKVGLVALLVIYHLVCGYYRKKLIGNAHYKSHRFWRFFNEMPTLILFAVVILVVVKPQF

SEQ ID NO: 417 - protein, 150 aa, Acinetobacter
MDAPSDAFLWVKALHIIAVVCWFAALFYLPRLYVYHAMSEDAVSHQRFEVMERKLYRGIMWPAMLATLITAHFLVDWGDATRHYHEALWFYLKVGLVGLLVIYHLICGYYRKKLINNAHYKSHKFWRYFNEMPTLILFAVVILVVVKPTL

SEQ ID NO: 418 - protein, 150 aa, Acinetobacter
MDAPSDAFLWVKALHIIAVVCWFAALFYLPRLYVYHAMSDDAISHQRFEVMERKLYRGIMWPAMIATLITAHFLVDWGDATRHYHEALWFYLKVGLVGLLVIYHLMCGYYRKKLIDNAHYKSHKFWRYFNEMPTLILFAVVILVVVKPTF

SEQ ID NO: 419 - protein, 150 aa, Acinetobacter
MDAPSDAFLWVKALHIIAVVCWFAALFYLPRLYVYHAMSEDAASHQRFEIMERKLYRGIMWPSMIATLITAHFLVEWGDATRHYHQATWFYLKVALVALLVIYHLVCGYYRKKLIGNAHYKSHKFWRFFNEMPTLILFAVVILVVVKPQF

SEQ ID NO: 420 - protein, 150 aa, Acinetobacter
MDAPSDAFLWVKALHIIAVVCWFAALFYLPRLYVYHAMSDDAVSHQRFEVMERKLYRGIMWPSMIATLITAHFLVDWGDATRHYHEALWFYLKVGLVGLLVIYHFVCGYYRKKLIRHAHYKSHKFWRFFNEMPTLILFAVVILVVVKPTF

SEQ ID NO: 421 - protein, 150 aa, Acinetobacter
MDAPSDAFLWVKALHIIAVVCWFAALFYLPRLYVYHAMSEDTVSHERFQVMERKLYRGIMWPAMVATLITAHFLVDWGDATRHYHEALWFYLKVGLVGLLVIYHLVCGYYRKKLIENAHYKSHKFWRFFNEMPTLILFAVVILVVVKPTF

SEQ ID NO: 422 - protein, 150 aa, Acinetobacter
MDAPSDAFLWVKALHIIAVVCWFAALFYLPRLYVYHAMSEDAASHQRFEVMERKLYRGIMWPSMIATLITAHFLVEWGDATRHYHQATWFYLKVALVALLVIYHLVCGYYRKKLIGNAHYKSHRFWRFFNEMPTLILFAVVILVVVKPQF

SEQ ID NO: 423 - protein, 150 aa, Acinetobacter
MDAPSDAFLWVKALHIIAVVCWFAALFYLPRLYVYHAMSEDAVSHQRFEVMERKLYRGIMWPSLIATLITAHFLVDWGDATRHYHQATWFYLKVALVALLVIYHLACGYYRKKLIGNAHYKSHKFWRFFNEMPTLILFAVVILVVVKPQF

SEQ ID NO: 424 - protein, 150 aa, Acinetobacter
MDAPSDAFLWVKALHIIAVVCWFAALFYLPRLYVYHAMSEDAVSHQRFEVMERKLYRGIMWPAMLATLITAHFLVDWGDATRHYHEALWFYLKVGLVGLLVIYHLVCGHYRKKLMENAHYKSHKFWRYFNEMPTLILFAVVILVVVKPTF

SEQ ID NO: 425 - protein, 150 aa, Acinetobacter
MDAPSDAFLWVKALHIIAVVCWFAALFYLPRLYVYHAMSEDVVSHQRFEIMERKLYRGIMWPAMVATLITAHFLVDWGDATRHYHEALWFYLKVGLVGLLVIYHLVCGYYRKKLMENAHYKSHKFWRFFNEMPTLILFAVVILVVVKPTF

SEQ ID NO: 426 - protein, 150 aa, Acinetobacter
MDAPSDAFLWVKALHIIAVVCWFAALFYLPRLYVYHAMSEDAASHQRFEVMERKLYRGIMWPSMIATLITAHFLVEWGDATRHYHQATWFYLKVALVALLIIYHLVCGYYRKKLIGNAHYKSHRFWRFFNEMPTLILFAVVILVVVKPQF

SEQ ID NO: 427 - protein, 150 aa, Acinetobacter
MDAPSDAFLWVKALHIIAVVCWFAALFYLPRLYVYHAMSEDAASHQRFEIMERKLYRGIMWPSMIATLITAHFLVEWGDATRHYHQATWFYLKVALVALLVIYHLVCGYYRKKLIGNAHYKSHRFWRFFNEMPTLILFAVVILVVVKPQF

SEQ ID NO: 428 - protein, 150 aa, Acinetobacter
MDAPTDAFLWVKALHIIAVVCWFAALFYLPRLYVYHAMSEDTISHQRFEVMERKLYRGIMWPSMIATLITAHFLVDWGDGTQHYHQAGWFYLKVALVALLVIYHFVCGYYRKKLIGNAHYKSHKFWRFFNEMPTLILFAVVILVVVKPQF

SEQ ID NO: 429 - protein, 150 aa, Acinetobacter
MDAPSDAFLWVKALHIIAVVCWFAALFYLPRLYVYHAMSEDAASHQRFEIMERKLYRGIMWPSLIATLITAHFLVDWGDATRHYHQATWFYLKVALVALLVIYHLACGYYRKKLIGNAHYKSHKFWRFFNEMPTLILFAVVILVVVKPQF

SEQ ID NO: 430 - protein, 150 aa, Acinetobacter
MDAPSDAFLWVKALHIIAVVCWFAALFYLPRLYVYHAMSEDVVSHQRFEIMERKLYRGIMWPAMVATLITAHFLVDWGDATRHYHEALWFYLKVGLVGLLVIYHLICGYYRKKLMENAHYKSHKFWRFFNEMPTLILFAVVILVVVKPTF

SEQ ID NO: 431 - protein, 150 aa, Acinetobacter
MDAPSDAFLWVKALHIIAVVCWFAALFYLPRLYVYHAMSEDAASHQRFEVMERKLYRGIMWPSMIATLITAHFLVEWGDATRHYHQATWFYLKVALVALLVIYHLVCGYYRKKLIGNAHYKSHRFWRFFNEMPTVILFAVVILVVVKPQF

SEQ ID NO: 432 - protein, 150 aa, Acinetobacter
MDAPSDAFLWVKALHIIAVVCWFAALFYLPRLYVYHAMSEDTLSHQRFEIMERKLYRGIMWPSMIATLITAHFLVDWGDATRNYHDALWFYLKVALVGLLVIYHLVCGYYRQKLIGNAHYKSHKFWRFFNEMPTVLLLAIVILVVVKPQF

SEQ ID NO: 433 - protein, 150 aa, Acinetobacter
MDAPSDAFLWVKALHIIAVVCWFAALFYLPRLYVYHAMSEDAVSHARFQVMERKLYRGIMWPAMLATLITAHFLVDWGDATRHYHEAVWFYLKVGLVGLLVIYHLVCGHYRKKLMENAHYKSHKFWRYFNEMPTLILFAVVILVVVKPTF

SEQ ID NO: 434 - protein, 150 aa, Acinetobacter
MDAPSDAFLWVKALHIIAVVCWFAALFYLPRLYVYHAMSEDAVSHQRFEVMERKLYRGIMWPSMIATLITAHFLVDWGDATRNYHDALWFYLKVALVGLLVIYHLVCGYYRLKLIGNAHYKSHKFWRFFNEMPTVLLFAIVILVVVKPVF

SEQ ID NO: 435 - protein, 150 aa, Acinetobacter
MDAPSDAFLWVKALHIIAVVCWFAALFYLPRLYVYHAMSEDAVSHQRFEVMERKLYRGIMWPSMIATLITAHFLVDWGDATRHYHEALWFYLKVGLVGLLVIYHLVCGYYRKKLIGNAHYKTHKFWRFFNEMPTLILFAVVVLVVVKPQF

SEQ ID NO: 436 - protein, 150 aa, Acinetobacter
MDAPSSAFLWVKALHIIAVVCWFAALFYLPRLYVYHAMSKDQASYERFQIMERKLYRGIMWPAMIATLITAHFLVDWGDATRHYHEALWFYFKVGLVGLLIIYHFVCGYYRKKLIDNAHYKTHKFWRMFNELPTVILFAVVILVVVKPQF

SEQ ID NO: 437 - protein, 149 aa, Acinetobacter
MNAPSDAFFWIKALHIIAVVCWFAALFYLPRLYVYHAMSDDTVSHQRFEVMERKLYRGIMWPAMIATLITAHFLVDWGDQFYHYHEALWFYLKVALVGLLVIYHFVCGYYRKKLIGNAHYKTHKFWRFFNEMPTLLLFAIVILVVVKPF

SEQ ID NO: 438 - protein, 150 aa, Acinetobacter
MDAPSDAFLWVKALHIIAVVCWFAALFYLPRLYVYHAMSEDTVSHQRFEVMERKLYRGIMWPSMIATLITAHFLVDWGDATRHYHEALWFYLKVGLVGLLVIYHFVCGYYRKKLIGNAHYKSHKFWRFFNEMPTLILLAVVILVVVKPQF

SEQ ID NO: 439 - protein, 142 aa, Acinetobacter
MWVKALHIIAVVCWFAALFYLPRLYVYHAMSDDATSHQRFEVMERKLYRGIMWPSMIATLITAHFLVDWGDATRHYHEATWFYLKVGLVALLVIYHLVCGYYRKKLIGNAHYKSHKFWRFFNEMPTLILFAVVILVVVKPQF

SEQ ID NO: 440 - protein, 150 aa, Acinetobacter
MDAPSDAFLWVKALHIIAVVCWFAALFYLPRLYVYHAMSDDAVSHQRFEVMERKLYRGIMWPSMIATLITAHFLVDWGDATRHYHEALWFYLKVGLVGLLVIYHFVCGYYRKKLIGNAHYKSHKFWRFFNEMPTLILVAVIILVVVKPQF

SEQ ID NO: 441 - protein, 150 aa, Acinetobacter
MDAPSDAFLWVKALHIIAVVCWFAALFYLPRLYVYHAMSEDAVSHQRFEVMERKLYRGIMWPSMIATLVTAHFLVDWGDATRHYHEALWFYLKVALVGLLVIYHLVCGYYRKKLIGNAHYKSHKFWRFFNEMPTVILLAVVILVVVKPQF

SEQ ID NO: 442 - protein, 150 aa, Acinetobacter
MDAPSDAFLWVKALHIIAVVCWFAALFYLPRLYVYHAMSEDGTSHQRFQIMERKLYRGIMWPSMLATLITAHFLVDWGDATRHYHEALWFYLKVGLVGLLVIYHFVCGYYRKKLMENPHYKSHKFWRFFNEMPTLILLAVVILVVVKPQF

SEQ ID NO: 443 - protein, 150 aa, Acinetobacter
MNAPSEAFLWVKALHIIAVVCWFAALFYLPRLYVYHAMSDDDASHQRFEVMERKLYRGIMWPAMIATLITAHFLVDWGDATYHYHEALWFYLKVGLVGLLVIYHFVCGYYRKKLIGNAHYKSHKFWRVFNEMPTLILLAVVILVVVKPTF

SEQ ID NO: 444 - protein, 148 aa, Acinetobacter
MVSEAFLWVKALHIIAVVCWFAALFYLPRLYVYHAMSDDLASHQRFEVMERKLYRGIMWPAMIATLITAHFLVDWGDATQHYHEATWFYIKVALVGLLVIYHFVCGYYRKKLIGNAHYKSHKFWRFFNEMPTLLLLAIVILVVVKPQF

SEQ ID NO: 445 - protein, 150 aa, Acinetobacter
MNAPSDAFLWVKALHIIAVVCWFAALFYLPRLYVYHAMSDDAISHQRFQVMERKLYRGIMWPAMIATLITAHFLVAWGDATQHYHLAHWFYVKVALVGLLVIYHFVCGYYRKKLIENAHYKSHKFWRFFNEMPTVILLAVVILVVVKPQF

SEQ ID NO: 446 - protein, 150 aa, Acinetobacter
MNAPSDAFLWVKALHIIAVVCWFAALFYLPRLYVYHAMSDDAISHQRFQVMERKLYRGIMWPAMIATLITAHFLVAWGDATQHYHLAHWFYLKVALVGLLVIYHFVCGYYRKKLIENAHYKSHKFWRFFNEMPTVILLAVVILVVVKPQF

SEQ ID NO: 447 - protein, 150 aa, Acinetobacter
MDVPSDAFLWVKAFHIISIVCWFAALFYLPRLYVYHAMSNDAVSHQRFQVMERKLYRGIMWPSMIATLITAHFLVDWGDATQHYHEALWFYLKLGLVGLLVIYHLFCGYYRQKLILDAHYKSHKFWRFFNEMPTFILVAVIILVVVKPHF

SEQ ID NO: 448 - protein, 181 aa, Escherichia
MKTLILFSTRDGQTREIASYLASELKELGIQADVANVHRIEEPQWENYDRVVIGASIRYGHYHSAFQEFVKKHATRLNSMPSAFYSVNLVARKPEKRTPQTNSYARKFLMNSQWRPDRCAVIAGALRYPRYRWYDRFMIKLIMKMSGGETDTRKEVVYTDWEQVANFAREIAHLTDKPTLK

SEQ ID NO: 449 - protein, 181 aa, Escherichia; identical to SEQ ID NO: 448

SEQ ID NO: 450 - protein, 181 aa, Enterobacter
MKTLILFSTRDGQTREIASYLASELKELGIQADVTNVHRIEEPQWENYDRVVIGASIRYGHYHSAFQEFVKKHATRLNSMPSAFYSVNLVARKPEKRTPQTNSYARKFLMNSQWRPDRCAVIAGALRYPRYRWYDRFMIKLIMKMSGGETDTRKEVVYTDWEQVANFAREIAHLTDKPTLK

SEQ ID NO: 451 - protein, 181 aa, Shigella
MKTLILFSTRDGQTREIASYLASELKELGIQTDVANVHRIEEPQWENYDRVVIGASIRYGHYHSAFQEFVKKHATRLNSMPSAFYSVNLVARKPEKRTPQTNSYARKFLMNSQWRPDRCAVIAGALRYPRYRWYDRFMLKLIMKMSGGETDTRKEVVYTDWEQVANFAREIAHLTDKPTLK

SEQ ID NO: 452 - protein, 181 aa, Escherichia
MKTLILFSTRDGQTREIAAYLASELKELGIQADVANVHRIEEPQWENYDRVVIGASIRYGHYHSAFQEFVKKHATRLNSMPSAFYSVNLVARKPEKRTPQTNSYARKFLMSSQWRPDRCAVIAGALRYPRYRWYDRFMIKLIMKMSGGETDTRKEVVYTDWEQVANFAREIAHLTDKPTLK

SEQ ID NO: 453 - protein, 180 aa, Shigella
MKTLILFSTRDGQTREISSYLASELKELGIQTDVANVHRIEEPQWENYDRVVIGASIRYGHYHSAFQEFVKKHATRLNSMPSAFYSVNLVARKPEKRTPQTNSYARKFLMNSQWRPDRCAVIAGALRYPRYRWYDRFMLKLIMKMSGGETDTRKEVVTDWEQVANFAREIAHLTDKPTLK

SEQ ID NO: 454 - protein, 181 aa, Escherichia
MKTLILFSTRDGQTREIASYLASELKELGIQADVANVHRTEEPQWENYDRVVIGASIRYGHYHSAFQEFVKKHATRLNSMPSAFYSVNLVARKPEKRTPQTNSYARKFLMSSQWRPDRCAVIAGALRYPRYRWYDRFMIKLIMKMSGGETDTRKEVVYTDWEQVANFAREIAHLTDKPTLK

SEQ ID NO: 455 - protein, 181 aa, Escherichia
MKTLILFSTRDGQTREIASYLASELKELGIQADVANVHRIEEPQWENYDRVVIGASIRYGHYHSAFQEFVKKHATQLNSMPSAFYSVNLVARKPEKRTPQTNSYARKFLMNSQWRPDRCAVIAGALRYPRYRWYDRFMIKLIMKMSGGETDTRKEVVYTDWEQVANFAREIAHLTDKPTPK

SEQ ID NO: 456 - protein, 181 aa, Shigella
MKTLILFSTRDGQTREIASYLASELKELGIQTDVANVHRIEEPQWENYGRVVIGASIRYGHYHSAFQEFVKKHATRLNSMPSAFYSVNLVARKPEKRTPQTNSYARKFLMNSQWRPDRCAVIAGALRYPRYRWYDRFMLKLIMKMSGGETDTRKEVVYTDWEQVANFAREIAHLTDKPTLK

SEQ ID NO: 457 - protein, 181 aa, Escherichia
MKTLILFSTRDGQTREIASYLASELKELGIQADVANVHRIEEPQWENYDRVVIGASIRYGHYHSAFQEFVKKHATRLNSMPSAFYSVNLVARKPEKRTPQTNSYARKFLMSSQWRPDRCAVIAGALRYPRYRWYDRFMIKLIMKMSGGETDTRKEVVYTDWQQVENFAREIAHLTDKPTLK

SEQ ID NO: 458 - protein, 181 aa, Shigella
MKTLILFSTRDGQTREIASYLASELKELGIQTDVANVHRIEEPQWENYDRVVIGASIRYGHYHSAFQEFVKKHATRLNSMPSAFYSVNLVARKPEKRTPQTNSYARKFLMNSQWRPDRCAVIAGALRYPRYRWYDRFMIKLIMKMSGGETDTRKEVVYTDWEQVANFAREIAQLTNKPTLK

SEQ ID NO: 459 - protein, 181 aa, Escherichia
MKTLILFSTRDGQTREIASYLASELKELGIQADVANVHRTEEPQWENYDRVVIGASIRYGHYHSAFEEFVKKHETRLNSMPSAFYSVNLVARKPEKRTPQTNSYARKFLMSSQWRPDRCAVIAGALRYPRYRWYDRFMIKLIMKMSGGETDTRKEVVYTDWEQVANFAREIAHLTDKPTLK

SEQ ID NO: 460 - protein, 181 aa, Escherichia
MKTLILFSTRDGQTREIASYLASELKELGILADVANVHRTEEPQWENYDRVVIGASIRYGHYHSAFQEFVKKHATRLNSMPSAFYSVNLVARKPEKRTPQTNSYARKFLMSSQWRPDRCAVIAGALRYPRYRWYDRFMIKLIMKMSGGETDTRKEVVYTDWEQVANFAREIAHLTDKPTMK

SEQ ID NO: 461 - protein, 181 aa, Enterobacter
MKTLILFSTRDGQTREIASYLASELKELGIQTDVANVHRIEEPQWENYDRVVIGASIRYGHYHSAFQEFVKKHATRLNSMPSAFYSVNLVARKPEKRTPQTNSYARKFLMSSQWRPDRCAVIAGALRYPRYRWYDRFMIKLIMKMSGGETDTRKEVVYTDWEQVANFAREIAQLTNKPTLK

SEQ ID NO: 462 - protein, 181 aa, Shigella
MKTLILFSTRDGQTREIASYLASELKELGIQTDVANVHRIEEPQWKNYDRVVIGASIRYGHYHSAFQEFVKKHATRLNSMPSAFYSVNLVARKPEKRTPQTNSYARKFLMSSQWRPDRCAVIAGALRYPRYRWYDRFMIKLIMKMSGGETDTRKEVVYTDWEQVANFAREIAQLTNKPTLK

SEQ ID NO: 463 - protein, 181 aa, Shigella
MKTLILFSTRDGQTREIASYLASELKELGIQTDVANVHRIEEPQWENYDRVVIGASIRYGHYHSAFQEFVKKHATRLNSMPSAFYSVNLVARKPEKRTPQTNSYARKFLMSSQWRPDRCAVIAGALRYPRYCWYDRFMIKLIMKMSGGETDTRKEVVYTDWEQVANFAREIAQLTNKPTLK

SEQ ID NO: 464 - protein, 181 aa, Salmonella
MKTLILFSTRDGQTREIASYLASELKEMGIWADVVNLHRAEEPDWDSYDRVVIGASIRYGHYHSAFQEFVKKYATRLNGMPSAFYSVNLVARKAEKRTPQTNSYARKFLMSSPWRPDYCAVIAGALRYPRYRWYDRLMIKLIMKMSGGETDTRKEVVYTDWEQVANFAREIAHLTNKSSAK

SEQ ID NO: 465 - protein, 161 aa, Shigella
MASELKELGIQADVANVHRIEEPQWENYDRVVIGASIRYGHYHSAFQEFVKKHATRLNSMPSAFYSVNLVARKPEKRTPQTNSYARKFLMNSQWRPDRCAVIAGALRYPRYRWYDRFMIKLIMKMSGGETDTRKEVVYTDWEQVANFAREIAHLTDKPTLK

SEQ ID NO: 466 - protein, 181 aa, Citrobacter
MKTLILFSTRDGQTREIASYLASELKELGIWADVVNLHRTEEPEWDSYDRVVIGASIRYGHYHTAFQEFVKKHATRLNGMPSAFYSVNLVARKPEKRTPQTNSYARKFLMSSQWRPDRCAVIAGALLYPRYRWYDRIMIKLIMKMSGGETDTNKEVIYTDWEQVAGFAREIAQLTVKSPVK

SEQ ID NO: 467 - protein, 181 aa, Salmonella
MKTLILFSTRDGQTREIASYLASELKEMGIWADVVNLHRAEEPDWDSYDRVVIGASIRYGHYHSAFQEFVKKYATRLNGMPSAFYSVNLVARKAEKRTPQTNSYARKFLMSSPWRPDHCAVIAGALRYPRYRWYDRLMIKLIMKMSGGETDTSKEVVYTDWEQVANFAREIAHLTNKSSAK

SEQ ID NO: 468 - protein, 181 aa, Citrobacter
MKTLILFSTRDGQTREIASYLASELKELGIWADVINLHRTEELDWQSYDRVVIGASIRYGHYHAAFQEFVKKHATRLNAMPSAFYSVNLVARKPEKRTPQTNSYARKFLMSSQWRPDLCAVIAGALRYPRYRWYDRLMIKLIMKMSGGETDTSKEVVYTDWEQVANFARDIAQLTNKSLAK

SEQ ID NO: 469 - protein, 181 aa, Salmonella
MKTLILFSTRDGQTREIASYLASELKEMGIWADVVNLHRAEEPDWDSYDRVVIGASIRYGHYHSAFQEFVKKYATRLNGMPSAFYSVNLVARKAEKRTPQTNSYARKFLMSSPWRPDHCAVIAGALRYPRYRWYDRLMIKLIMKMSGGETDTSKEVVYTDWDQVANFAREIAHLTNKSSAK

SEQ ID NO: 470 - protein, 181 aa, Salmonella
MKTLILFSTRDGQTREIASYLASELKEMGIWADVVNLHRAEEPDWDSYDRVVIGASIRYGHYHSAFQEFVKKYATRLNGMPSAFYSVNLVARKAEKRTPQTNSYARKFLMSSPWRPDHCAVIAGALRYPRYRWYDRLMIKLIMKLSGGETDTSKEVVYTDWEQVANFAREIAHLTNKSSAK

SEQ ID NO: 471 - protein, 181 aa, Salmonella
MKTLILFSTRDGQTREIASYLASELKEMGIWADVVNLHRAEEPDWDKYDRVVIGASIRYGHYHSAFQEFVKKYSTRLNGMPSAFYSVNLVARKPEKRTPQTNSYARKFLMNSPWRPDHCAVIAGALRYPCYRWYDRLMIKLIMKMSGGETDTSKEVVYTDWDQVAKFAREIAHLTNKPSSK

SEQ ID NO: 472 - protein, 181 aa, Citrobacter
MKTLILFSTRDGQTREIASYLASELKELGIWADVINLHRTEELDWQSYDRVVIGASIRYGHYHAAFQEFVKKHATRLNAMPSAFYSVNLVARKPEKRTPQTNSYARKFLMSAQWRPDLCAVIAGALRYPRYRWYDRLMIKLIMKMSGGETDTSKEVVYTDWEQVANFARDIAQLTNKSLAK

SEQ ID NO: 473 - protein, 181 aa, Salmonella
MKTLILFSTRDGQTREIASYLASELKEMGIRADVVNLHRAEEPDWDSYDRVVIGASIRYGHYHSAFQEFVKKYATRLNGMPSAFYSVNLVARKAEKRTPQTNSYARKFLMSSPWRPDYCAVIAGALRYPRYRWYDRLMIKLIMKMSGGETDTSKEVVYTDWEQVAHFAREIAHLTNKSSAK

SEQ ID NO: 474 - protein, 181 aa, Citrobacter
MKTLILFSSRDGQTREIAAYLASELKELGIWADVFNLHRTEEPDWESYDRVVIGASIRYGHYHSAFLDFVKKHATRLNQMPSAFYSVNLVARKPEKRTPQTNSYARKFLMHSQWRPDRSAVIAGALLYPRYRWYDRIMIKLIMKMSGGETDTRKEVIYTDWEQVASFAREIAQLTDKSSVK

SEQ ID NO: 475 - protein, 181 aa, Salmonella
MKTLILFSTRDGQTREIASYLASELKEMGIWADVVNLHRAEEPDWDKYDRVVIGASIRYGHYHSAFQEFVKKYATRLNGMPSAFYSVNLVARKPEKRTPQTNSYARKFLMSSPWRPDHCAVIAGALRYPCYRWYDRLMIKLIMKMSGGETDTSKEVVYTDWDQVAKFAREIAHLTNKPSSK

SEQ ID NO: 476 - protein, 181 aa, Citrobacter
MKTLILFSTRDGQTREIASYLASELKALGIWADVINLHRTEELDWQSYDRVVIGASIRYGHYHAAFQEFVKKHATRLNAMPSAFYSVNLVARKPEKRTPQTNSYARKFLMSSQWRPDLCAVIAGALRYPRYRWYDRLMIKLIMKMSGGETDTSKEVVYTDWEQVANFARDIAQLTNKSLAK

SEQ ID NO: 477 - protein, 181 aa, Salmonella
MKTLILFSTRDGQTREIASYLASELKEMGIWADVVNLHRAEEPDWDSYDRVVIGASIRYGHYHSAFQEFVKKYATRLNGMPSAFYSVNLVARKAEKRTPQTNSYARKFLMSSPWRPDYCAVIAGALRYPRYRWYDRLMIKLIMKMSGGETDTSKEVVYTDWEQVAHFAREIAHLTNKSSAK

SEQ ID NO: 478 - protein, 181 aa, Salmonella
MKTLILFSTRDGQTREIASYLASELKEMGIWADVVNLHRAEEPDWDCYDRVVIGASIRYGHYHSAFQEFVKKYATRLNGMPSAFYSVNLVARKAEKRTPQTNSYARKFLMSSPWRPDYCAVIAGALRYPRYRWYDRLMIKLIMKMSGGETDTSKEVVYTDWEQVAHFAREIAHLTNKSSAK

SEQ ID NO: 479 - protein, 181 aa, Salmonella
MKTLILFSTRDGQTREIASYLASELKEMGIWADVVNLHRAEEPDWDSYDRVVIGASIRYGHYHSAFQEFVKKYATRLNGMPSAFYSVNLVSRKAEKRTPQTNSYARKFLMSSPWRPDYCAVIAGALRYPRYRWYDRLMIKLIMKMSGGETDTSKEVVYTDWEQVAHFAREIAHLTNKSSAK

SEQ ID NO: 480 - protein, 181 aa, Salmonella sp.
MKTLILFSTRDGQTREIASYLASELKDMGIWADVVNLHRAEEPDWDSYDRVVIGASIRYGHYHSAFQEFVKKYATRLNGMPSAFYSVNLVARKAEKRTPQTNSYARKFLMSSPWRPDYCAVIAGALRYPRYRWYDRLMIKLIMKMSGGETDTSKEVVYTDWEQVAHFAREIAHLTNKSSAK

SEQ ID NO: 481 - protein, 181 aa, Salmonella
MKTLILFSTRDGQTREIASYLASELKEMGIWGDVVNLHRAEEPDWDSYDRVVIGASIRYGHYHSAFQEFVKKYATRLNGMPSAFYSVNLVARKAEKRTPQTNSYARKFLMSSPWRPDYCAVIAGALRYPRYRWYDRLMIKLIMKMSGGETDTSKEVVYTDWEQVAHFAREIAHLTNKSSAK

SEQ ID NO: 482 - protein, 181 aa, Salmonella
MKTLILFSTRDGQTREIASYLASELKEMGIWADVVNLHRAEEPDWDSYDRVVIGASIRYGHYHSAFQEFVKKYATRLNGMPSAFYSVNLVARKAEKRTPQTNSYARKFLMSSPWRPDYCAVIAGALRYPRYRWYDRLMIKFIMKMSGGETDTSKEVVYTDWEQVAHFAREIAHLTNKSSAK

SEQ ID NO: 483 - protein, 181 aa, Salmonella
MKTLILFSTRDGQTREIASYLASELKEMGIWADVVNLHRAEEPDWDSYDRVVIGASIRYGHYHSAFQEFVKKYATRLNGMPSAFYSVNLVARKAEKRTPQTNSYARKFLMSSPWRPDYCAVIAGALRYPRYRWYDRLMIKLIMKMSGGETDTSKEAVYTDWEQVAHFAREIAHLTNKSSAK

SEQ ID NO: 484 - protein, 181 aa, Salmonella
MKTLILFSTRDGQTREIASYLASELKEMGIWADVVNLHRAEEPDWDSYDRVVIGASIRYGHYHSAFQEFVKKYATRLNGMPSAFYSVNLVARKAEKRTPQTNSYARKFLMSSPWRPDYCAVIAGALRYPRYRWYDRLMIKLIMKMSGGETDTSKEVVYTDWEQVTHFAREIAHLTNKSSAK

SEQ ID NO: 485 - protein, 181 aa, Salmonella
MKTLILFSTRDGQTHEIASYLASELKEMGIWADVVNLHRAEEPDWDSYDRVVIGASIRYGHYHSAFQEFVKKYATRLNGMPSAFYSVNLVARKAEKRTPQTNSYARKFLMSSPWRPDYCAVIAGALRYPRYRWYDRLMIKLIMKMSGGETDTSKEVVYTDWEQVAHFAREIAHLTNKSSAK

SEQ ID NO: 486 - protein, 181 aa, Salmonella
MKTLILFSTRDGQTREIASYLASELKEMGIWADVVNLHRAEEPDWDSYDRVVIGASIRYGHYHSAFQEFVKKYAKRLNGMPSAFYSVNLVARKAEKRTPQTNSYARKFLMSSPWRPDYCAVIAGALRYPRYRWYDRLMIKLIMKMSGGETDTSKEVVYTDWEQVAHFAREIAHLTNKSSAK

SEQ ID NO: 487 - protein, 181 aa, Salmonella
MKTLILFSTRDGQTREIASYLASELKEMGIWADVVNLHRAEEPDWDSYDRVVIGASIRYGHYHSAFQEFVKKYATRLNGMPSAFYSVNLVARKAEKRTPQTNSYARKFLMSSPWRPDYCAVIAGALRYPRYRWYDRLMIKLIMQMSGGETDTSKEVVYTDWEQVTHFAREIAHLTNKSSAK

SEQ ID NO: 488 - protein, 181 aa, Salmonella
MKTLILFSTWDGQTREIASYLASELKEMGIWADVVNLHRAEEPDWDSYDRVVIGASIRYGHYHSAFQEFVKKYATRLNGMPSAFYSVNLVARKAEKRTPQTNSYARKFLMSSPWRPDYCAVIAGALRYPRYRWYDRLMIKLIMKMSGGETDTSKEVVYTDWEQVAHFAREIAHLTNKSSAK

SEQ ID NO: 489 - protein, 181 aa, Salmonella
MKTLILFSTRDGQTREIASYLASELKEMGIWADVVNLHRAEEPDWDKYDRVVIGASIRYGHYHSAFQEFVKKYATRLNGMPSAFYSVNLVARKPEKRTPQTNSYARKFLMSSPWRPDYCAVIAGALRYPCYRWYDRLMIKLIMKMSGGETDTSKEVVYTDWDQVAKFAREIAHLTNKLSSK

SEQ ID NO: 490 - protein, 181 aa, Salmonella
MKTLILFSTRDGQTREIASYLASELKEMGIWGDVVNLHRAEEPDWDSYDRVVIGASIRYGHYHSAFQEFVKKYATRLNGMPSAFYSVNLVARKAEKRTPQTNSYARKFLMSSPWRPDYCAVIAGALRYPSYRWYDRLMIKLIMKMSGGETDTSKEVVYTDWEQVAHFAREIAHLTNKSSAK

SEQ ID NO: 491 - protein, 181 aa, Salmonella
MKTLILFSTRDGQTREIASYLASELKEMGIWADVVNLHRAEEPDWDSYDRVVIGASIRYGHYHSAFQEFVKKYATRLNGMPSAFYSVNLVARKAEKRTPQTNSYARKFLMSSPWRPDYCAVIAGALRYPRYRWYDRLMIKLIMKMSGGETDTSKEVVYTDWEQVTHFAREIAHLNNKSSAK

SEQ ID NO: 492 - protein, 181 aa, Salmonella
MKILILFSTRDGQTREIASYLASELKEMGIWADVVNLHRAEEPDWDSYDRVVIGASIRYGHYHSAFQEFVKKYAPRLNGMPSAFYSVNLVARKAEKRTPQTNSYARKFLMSSPWRPDHCAVIAGALRYPRYRWYDRLMIKLIMKMSGGETDTSKEVVYTDWDQVANFAREIAHLTNKSSAK

SEQ ID NO: 493 - protein, 181 aa, Citrobacter
MKTLILFSSRDGQTREIAAYLASELKELGICTDVVNLHRIEEPDWERYDRVVIGASIRYGHYHSAFLEFVKKHATRLNHMPSAFYSVNLVARKPEKRTPQTNSYARKFLMNSQWRPDRSAVIAGALLYPRYRWYDRMMIQLIMKMSGGETDTRKEVIYTDWEQVASFAREVAQLTPDSLVK

SEQ ID NO: 494 - protein, 176 aa, Salmonella
MKTLILFSTRDGQTREIASYLASELKEMGIWADVVNLHRAEEPDWDSYDRVVIGASIRYGHYHSAFQEFVKKYATRLNGMPSAFYSVNLVARKAEKRTPQTNSYARKFLMSSPWRPDYCAVIAGALRYPRYRWYDRLMIKLIMKMSGGETDTSKEVVYTDWEQVAHFAREIAHLTN

SEQ ID NO: 495 - protein, 181 aa, Salmonella
MKTLILFSTRDGQTREIASYLASELKEMGIWADVVNLHRAEEPDWDSYDRVVIGASIRYGHYHSAFQEFVKKYATRLNGMSSAFYSVNLVARKAEKRTPQTNSYARKFLMSSPWRPDYCAVIAGALRYPRYRWYDRLMIKLIMKMSGGETDTSKEVVYTDWEQVTHFAREIAHLTNKSSAK

SEQ ID NO: 496 - protein, 181 aa, Salmonella
MKTLILFSTRDGQTREIASYLASELKEMGIWADVVNLHRAEELDWDSYDRVVIGASIRYGHYHSSFQEFVKKYATRLNGMPSAFYSVNLVARKAEKRTPQTNSYARKFLMSSPWRPDYCAVIAGALRYPRYRWYDRLMIKLIMKMSGGETDTSKEVVYTDWEQVAHFAREIAHLTNKSSAK

SEQ ID NO: 497 - protein, 181 aa, Citrobacter
MKTLILFSSRDGQTREIAEYLASELKELGVWADVVNLHRTEEPDWKNYDSVVIGASIRYGHYHTAFQEFVKKHATRLNAMPSAFYSVNLVARKPEKRTPQTNSYARKFLMSSPWRPDRSAVIAGALLYPRYRWYDRVMIKLIMKMSGGETDTSKEVVYTDWEQVAIFAREIAQLTNKALLK

SEQ ID NO: 498 - protein, 181 aa, Citrobacter
MKTLILFSSRDGQTREIAAYLASELKELGVCTDVVNLHRTEEPDWERYDRVVIGASIRYGHYHSAFLEFVKKHATRLNHMPSAFYSVNLVARKPEKRTPQTNSYARKFLMNSQWRPDRSAVIAGALLYPRYRWYDRMMIQLIMKMSGGETDTRKEVIYTDWEQVASFAREIAQLTPDSVVK

SEQ ID NO: 499 - protein, 181 aa, Shigella
MKTLILFSSRDGQTREIAEYLASELKELGVWADVMNLHRTEEPEWKNYDSVVIGASIRYGHYHSAFQEFVKKHATQLNTMPSAFYSVNLVARKPEKRTPQTNSYARKFLMSSPWRPDHSAVIAGALLYPRYRWYDRVMIQLIMKMSGGETDTKKEVIYTDWEQVAGFAREIAQLTNKTLLK

SEQ ID NO: 500 - protein, 181 aa, Citrobacter
MKTLILFSSRDGQTREIAEYLASELKELGVWADVVNLHRTAEPDWQNYDSVVIGASIRYGHYHAAFQEFVKKHATRLNSMPSAFYSVNLVARKPEKRTPQTNSYARKFLMSSPWRPDHSAVIAGALLYPRYRWYDRVMIQLIMKMSGGETDTNKEVVYTDWEQVARFAREIAQLTNKASLK

SEQ ID NO: 501 - protein, 181 aa, Enterobacter
MKTLILFSSRDGQTREIAEYLASELKELGVWADVVNLHRTAEPDWQNYDSVVIGASIRYGHYHAAFQEFVKKHATRLNSMPSAFYSVNLVARKPEKRTPQTNSYARKFLMSSPWRPDHSAVIAGALLYPRYRWYDRVMIQLIMKMSGGETDTNKEVVYTDWEQVARFAREIAQLTNKTSLK

SEQ ID NO: 502 - protein, 174 aa, Salmonella
MKTLILFSTRDGQTREIASYLASELKEMGIWADVVNLHRAEEPDWDSYDRVVIGASIRYGHYHSAFQEFVKKYATRLNGMPSAFYSVNLVARKAEKRTPQTNSYARKFLMSSPWRPDYCAVIAGALRYPRYRWYDRLMIKLIMKMSGGETDTSKEVVYTDWEQVTHFAREIAHL

SEQ ID NO: 503 - protein, 181 aa, Citrobacter
MKTLILFSSRDGQTREIAEYLASELKELGVWADVVNLHRTAEPDWQNYDSVVIGASIRYGHYHAAFQEFVKKHATRLNSMPSAFYSVNLVARKPEKRTPQTNSYARKFLMGSPWRPDHSAVIAGALLYPRYRWYDRVMIQLIMKMSGGETDTNKEVVYTDWEQVARFAREIAQLTNKTSLK

SEQ ID NO: 504 - protein, 181 aa, Citrobacter
MKTLILFSSRDGQTREIAEYLASELKELGVWADVLNLHRTAEPDWQNYDSVVIGASIRYGHYHAAFQEFVKKHATRLNAMPSAFYSVNLVARKPEKRTPQTNSYARKFLMSSPWRPDRSAVIAGALRYPRYRWYDRVMIQLIMKMSGGETDTHKEVVYTDWEQVAGFAREIAQLTHKTVSK

SEQ ID NO: 505 - protein, 181 aa, Citrobacter
MKTLILFSSRDGQTREIAEYLASELKELGVWADVVNLHRTAEPDWQNYDSVVIGASIRYGHYHAAFQEFVKKHATRLNSMPSAFYSVNLVARKPEKRTPQTNSYARKFLMSSPWRPDHSAVIAGALLYPRYRWYDRVMIQLIMKMSGGETDTNKEVVYTDWEQVARFAREIAQLTNKALLK

SEQ ID NO: 506 - protein, 181 aa, Citrobacter
MKTLILFSSRDGQTREIAEYLASELKELGVWADVVNLHRTAEPDWQNYDSVVIGASIRYGHYHAAFQEFVKKHATRLNAMPSAFYSVNLVARKPEKRTPQTNSYARKFLMSSPWRPDRSAVIAGALLYPRYRWYDRVMIQLIMKMSGGETDTNKEVVYTDWEQVAGFAREIAQLTNKTLSK

SEQ ID NO: 507 - protein, 181 aa, Citrobacter
MKTLILFSSRDGQTREIAEYLASELKELGVWADVVNLHRTAEPDWQNYDSVVVGASIRYGHYHAAFQEFVKKHATRLNAMPSAFYSVNLVARKPEKRTPQTNSYARKFLMSSPWRPDRSAVIAGALLYPRYRWYDRVMIQLIMKMSGGETDTNKEVVYTDWEQVAGFAREIAQLTNKTLSK

SEQ ID NO: 508 - protein, 181 aa, Citrobacter
MKTLILFSSRDGQTREIAEYLASELKELGVWADVVNLHRTAEPDWQNYDSVVIGASIRYGHYHAAFQEFVKKHATRLNAMPSAFYSVNLVARKPEKRTPQTNSYARKFLMSSPWRPDRSAVIAGALLYPRYRWYDRVMIQLIMKMSGGETDTNKEVVYTDWEQVADFAREIAQLTHKTLSK

SEQ ID NO: 509 - protein, 181 aa, Citrobacter
MKTLILFSSRDGQTQEIAAYLASELKELGISTDVVNLHRTDEPDWERYDRVVIGASIRYGHYHSAFLAFVKKHATRLNRMPSAFYSVNLVARKPEKRTPQTNSYARKFLMNSQWRPDRSAVIAGALLYPRYRWYDRMMIQLIMKMSGGETDTRKEVIYTDWAQVASFAREIAQLTPDSLVK

SEQ ID NO: 510 - protein, 181 aa, Citrobacter
MKTLILFSSRDGQTREIAEYLASELKELGVWADVVNLHRTAEPDWQNYDSVVIGASIRYGHYHAAFQEFVKKYATRLNSMPSAFYSVNLVARKPEKRTPQTNSYARKFLMSSPWRPDHSAVIAGALLYPRYRWYDRVMIQLIMKMSGGETDTNKEVVYTDWEQVARFAREIAQLTNKALLK

SEQ ID NO: 511 - protein, 181 aa, Citrobacter
MKTLILFSSRDGQTREIAEYLASELKELGVWADVVNLHRTAEPDWQHYDSVVIGASIRYGHYHAAFQEFVKKHATRLNAMPSAFYSVNLVARKPEKRTPQTNSYARKFLMSSPWRPDRSAVIAGALLYPRYRWYDRVMIQLIMKMSGGETDTNKEVVYTDWEQVADFAREIAQLTHKTLSK

SEQ ID NO: 512 - protein, 181 aa, Citrobacter
MKTLILFSSRDGQTREIAEYLASELKELGVWTDVVNLHRTAEPDWQNYDSVVIGASIRYGHYHAAFQEFVKKHATRLNAMPSAFYSVNLVARKPEKRTPQTNSYARKFLMSSPWRPDRSAVIAGALLYPRYRWYDRVMIQLIMKMSGGETDTHKEVVYTDWEQVAGFAREIAQLTHKTLPK

SEQ ID NO: 513 - protein, 187 aa, Salmonella
MNNGVTRENIDSFSTRDGQTREIASYLASELKEMGIWADVVNLHRAEEPDWDSYDRVVIGASIRYGHYHSAFQEFVKKYATRLNGMPSAFYSVNLVARKAEKRTPQTNSYARKFLMSSPWRPDYCAVIAGALRYPRYRWYDRLMIKLIMKMSGGETDTSKEVVYTDWEQVTHFAREIAHLTNKSSAK

SEQ ID NO: 514 - protein, 181 aa, Citrobacter
MKTLILFSSRDGQTREIAEYLASELKELGVWTDVVNLHRTAEPDWKNYDSVVIGASIRYGHYHSAFQEFVKKYATRLNAMPSAFYSVNLVARKPEKRTPQTNSYARKFLMSSPWRPDRSAVIAGALLYPRYRWYDRVMIQLIMKMSGGETDTNKEVVYTDWEQVAGFAREIAQLTHKTLPK

SEQ ID NO: 515 - protein, 171 aa, Salmonella
DGQTREIASYLASELKEMGIWADVVNLHRAEEPDWDSYDRVVIGASIRYGHYHSAFQEFVKKYATRLNGMPSAFYSVNLVARKAEKRTPQTNSYARKFLMSSPWRPDYCAVIAGALRYPRYRWYDRLMIKLIMKMSGGETDTSKEVVYTDWEQVAHFAREIAHLTNKSSAK

SEQ ID NO: 516 - protein, 181 aa, Enterobacter
MKTLILFSTRDGQTREIAAYLASELKELGIYSDVVNLNRAEQIAWQDYDRVVIGASIRYGHFHPALDRFVKKHTAVLNKLPGAFYSVNLVARKAEKRTPQTNSYTRKFLLNSPWQPDLCAVFAGALRYPRYRWYDRFMIRLIMKMTGGETDTRKEVVYTDWSQVASFAREIAHLTDNSRLK

SEQ ID NO: 517 - protein, 181 aa, Enterobacter
MKTLILFSTRDGQTREIAAYLASELKELGIYSDVVNLNRVEQISWQDYDRVVIGASIRYGHFHPALDRFVKKHTAVLNKLPGAFYSVNLVARKPEKRTPQTNSYTRKFLLSSPWQPELCAVFAGALRYPRYRWYDRFMIRLIMKMTGGETDTRKEVVYTDWSQVASFAREIAHLTDDSRHK

SEQ ID NO: 518 - protein, 181 aa, Enterobacter
MKTLILFSTRDGQTREIAAYLASELKELGIYSDVVNLNRAEQISWQDYDRVVIGASIRYGHFHPALDRFVKKHTAVLNKLPGAFYSVNLVARKPEKRTPQTNSYTRKFLLNSPWQPDLCAVFAGALRYPRYRWYDRFMIRLIMKMTGGETDTRKEVVYTDWSQVASFAREIAHLTGDSRHK

SEQ ID NO: 519 - protein, 181 aa, Enterobacter
MKTLILFSTRDGQTREIAAYLASELKELGIYSDVVNLNRAEQIAWQDYDRVVIGASIRYGHFHPALDRFVKKHAAVLNKMPGAFYSVNLVARKAEKRTPQTNSYTRKFLLSSPWQPDLCAVFAGALRYPRYRWYDRFMIRLIMKMTGGETDTRKEVVYTDWSQVASFAREIAHLTGDSRLK

SEQ ID NO: 520 - protein, 181 aa, Enterobacter
MKTLILFSTRDGQTREIAAYLASELKELGIYSDVVNLNRAEQIAWQDYDRVVIGASIRYGHFHPALDRFVKKHTAVLNKLPGAFYSVNLVARKAEKRTPQTNSYTRKFLLNSPWQPDLCAVFAGALRYPRYRWYDRFMIRLIMKMTGGETDTRKEVVYTDWSQVASFAREIAHLTGNSRLK

SEQ ID NO: 521 - protein, 181 aa, Enterobacter
MKTLILFSTRDGQTREIAAYLASELKELGIYSDVVNLNRADQITWQDYDRVVIGASIRYGHFHPALDRFVKKHTAKLNTLPGAFYSVNLVARKPEKRTPQTNSYTRKFLLNSPWQPELCAVFAGALRYPRYRWYDRFMIRLIMKMTGGETDTRKEVVYTDWSQVASFAREIAHLTGDSRHK

SEQ ID NO: 522 - protein, 181 aa, Enterobacter
MKTLILFSTRDGQTREIASYLASELKELGIYSDVVNLNRTEQITWQDYDRVVIGASIRYGHFHPALDRFVKKHTAVLNKLPGAFYSVNLVARKAEKRTPQTNSYTRKFLLNSPWRPDLCAVFAGALRYPRYRWYDRFMIRLIMKMTGGETDTRKEVVYTDWSQVASFAREIAHLSRDSQRK

SEQ ID NO: 523 - protein, 181 aa, Enterobacter
MKTLILFSTRDGQTREIAAYLASELKELGIYSDVVNLNRAEQITWQEYDRVVIGASIRYGHFHPALDRFVKKHTAVLNKLPGAFYSVNLVARKAEKRTPQTNSYTRKFLLSSPWQPDLCAVFAGALRYPRYRWYDRFMIRLIMKMTGGETDTRKEVVYTDWSQVASFAREIAHLTDDSRLK

SEQ ID NO: 524 - protein, 181 aa, Enterobacter
MKTLILFSTRDGQTREIAAYLASELKELGIYSDVVNLNRAEQIAWQDYDRVVIGASIRYGHFHPALDRFVKKHTAVLNKMPGAFYSVNLVARKAEKRTPQTNSYTRKFLLSSPWQPDLCAVFAGALRYPRYRWYDRFMIRLIMKMTGGETDTRKEVVYTDWSQVASFAREIAHLTGDSRLK

SEQ ID NO: 525 - protein, 181 aa, Enterobacter
MKTLILFSTRDGQTREIAAYLASELKELGIYSDVVNLNRAEQIAWQDYDRVVIGASIRYGHFHPALDRFVKKHTAILNKMPGAFYSVNLVARKAEKRTPQTNSYTRKFLLSSPWQPDLCAVFAGALRYPRYRWYDRFMIRLIMKMTGGETDTRKEVVYTDWSQVASFAREIAHLTGDSRLK

SEQ ID NO: 526 - protein, 180 aa, Enterobacter
MKTLILFSTRDGQTREIAAYLASELKELGIYSDVVNLNRAEQIAWQDYDRVVIGASIRYGHFHPALDRFVKKHTAVLNKMPGAFYSVNLVARKAEKRTPQTNSYTRKFLLSSPWQPDLCAVFAGALRYPRYRWYDRFMIRLIMKMTGGETDTRKEVVTDWSQVATFAREIAHLTGDSRLK

SEQ ID NO: 527 - protein, 181 aa, Enterobacter
MKTLILFSTRDGQTREIASYLASELKELGVYADVVNLNRTEEISWQDYDRVVIGASIRYGHFHPALDSFVKKHTAVLNALPGAFYSVNLVARKAEKRTPQTNSYTRKFLLGSPWQPDLCAVFAGALRYPRYRWYDRFMIRLIMKMTGGETDTRKEVVYTDWAQVASFAREIAQLTADSKVK

SEQ ID NO: 528 - protein, 181 aa, Enterobacter
MKTLILFSTRDGQTREIASYLASELQELGIYSDVVNLNRTEQIAWQDYDRVVIGASIRYGHFHPALDRFVKKHTAALNKLPGAFYSVNLVARKPEKRTPQTNSYTRKFLLNSPWQPDLCAVFAGALRYPRYRWYDRFMIRLIMKMTGGETDTRKEVVYTDWTQVSSFAREIAHLSPESRRI

SEQ ID NO: 529 - protein, 181 aa, Enterobacter
MKTLILFSTRDGQTREIAAYLASELKELGIYSDVVNLNRAEQIAWHDYDRVVIGASIRYGHFHPALDRFVKKHTAVLNKMPGAFYSVNLVARKAEKRTPQTNSYTRKFLLSSPWQPDLCAVFAGALRYPRYRWYDRFMIRLIMKMTGGETDTRKEVVYTDWSQVASFAREIAHLTGDSRLK

SEQ ID NO: 530 - protein, 181 aa, Enterobacter
MKTLILFSTRDGQTREIAAYLASELKELGIYSDVVNLNRAEQIAWQDYDRVVIGASIRYGHFHPALDRFVKKHTAKLNALPGAFYSVNLVARKAEKRTPQTNSYTRKFLLSSPWQPDLCAVFAGALRYPRYRWYDRFMIRLIMKMTGGETDTRKEVVYTDWSQVASFAREIAHLTGDSRHK

SEQ ID NO: 531 - protein, 181 aa, Enterobacter
MKTLILFSTRDGQTREIASYLASELQELGIYSDVVNLNRTEQIAWQDYDRVVIGASIRYGHFHPALDRFVKKHTAALNKLPGAFYSVNLVARKPEKRTPQTNSYTRKFLLNSPWQPDLCAVFAGALRYPRYRWYDRFMIRLIMKMTGGETDTRKEVVYTDWTQVSSFARDIAHLSPESRRI

SEQ ID NO: 532 - protein, 181 aa, Enterobacter
MKTLILFSTRDGQTREIAAYLASELKELGIYSDVVNLNRAEQIAWQEYDRVVIGASIRYGHFHPALDRFVKKHTAVLNKLPGAFYSVNLVARKAEKRTPQTNSYTRKFLLSSPWQPDLCAVFAGALRYPRYRWYDRFMIRLIMKMTGGETDTRKEVVYTDWSQVASFAREIAHLTGDSRLK

SEQ ID NO: 533 - protein, 181 aa, Enterobacter
MKTLILFSTRDGQTREIAAYLASELKELGIYSDVVNLNRAEEIAWQEYDRVVIGASIRYGHFHPALDRFVKKHTAVLNTLPGAFYSVNLVARKAEKRTPQTNSYTRKFLLGSPWQPDLCAVFAGALRYPRYRWYDRFMIRLIMKMTGGETDTRKEVVYTDWSQVASFAREIAHLAGDSRLK

SEQ ID NO: 534 - protein, 181 aa, Enterobacter
MKTLILFSTRDGQTREIAAYLASELKELGIYSDVVNLNRAEQIAWQDYDRVVIGASIRYGHFHPALDRFVKKHTAVLNKMPGAFYSVNLVARKAEKRTPQTNSYTRKFLLSSPWQPDLCAVFAGALRYPRYRWYDRFMIRLIMKMTGGETDTHKEVVYTDWSQVASFAREIAHLTGDSRLK

SEQ ID NO: 535 - protein, 181 aa, Enterobacter
MKTLILFSTRDGQTREIASYLASELKELGIYSDVVNLNRTEQIAWQDYDRVVIGASIRYGHFHPALDRFVKKHTAVLNKLPGAFYSVNLVARKPEKRTPQTNSYTRKFLLSSPWQPDISAVFAGALRYPRYRWYDRFMIRLIMKMTGGETDTRKEVVYTDWSQVASFAREIAHLSGDSRLK

SEQ ID NO: 536 - protein, 181 aa, Enterobacter
MKTLILFSTRDGQTREIAAYLASELKELGIYSDVVNLNRAEQIAWQEYDRVVIGASIRYGHFHPALDRFVKKHTAVLNKLPGAFYSVNLVARKAEKRTPQTNSYTRKFLLGSPWQPDLCAVFAGALRYPRYRWYDRFMIRLIMKMTGGETDTRKEVVYTDWSQVASFAREIAHLTGDSRLK

SEQ ID NO: 537 - protein, 181 aa, Enterobacter
MKTLILFSTRDGQTREIAAYLASELKELGIYSDVVNLNRAEQITWQEYDRVVIGASIRYGHFHPALVRFVKKHTAVLNKLPGAFYSVNLVARKAEKRTPQTNSYTRKFLLSSPWQPALCAVFAGALRYPRYRWYDRFMIRLIMKMTGGETDTRKEVVYTDWSQVASFAREIAHLTDDSRLK

SEQ ID NO: 538 - protein, 181 aa, Enterobacter
MKTLILFSTRDGQTREIAAYLASELKELGIYSDVVNLNRVGQITWQDYDRVVIGASIRYGHFHPALDRFVKKHTAVLNKLPGAFYSVNLVARKAEKRTPQTNSYTRKFLLNSPWQPDLCAVFAGALRYPRYRWYDRFMIRLIMKMTGGETDTRKEVVYTDWSQVASFAREIAHLSGDSRVK

SEQ ID NO: 539 - protein, 299 aa, Escherichia [sequence omitted]

SEQ ID NO: 540 - protein, 299 aa, Escherichia
MKPDAHQVKQFLLNLQDTICQQLTAVDGAEFVEDSWQREAGGGGRSRVLRNGGVFEQAGVNFSHVHGEAMPASATAHRPELAGRSFEAMGASLVVHPHNPYVPTSHANVRFFIAEKPGADPVWWFGGGFDLTPFYGFEEDAIHWHRTARDLCLPFGEDVYPRYKKWCDEYFYLKHRNEQRGIGGLFFDDLNTPDFDRCFAFMQAVGKGYTDAYLPIVERRKAMAYGERERNFQLYRRGRYVEFNLVWDRGTLFGLQTGGRTESILMSMPPLVRWEYDYQPKDGSPEAALSEFIKVRDWV

SEQ ID NO: 541 - protein, 299 aa, Shigella
MKPDAHQVKQFLLNLQDTICQQLTAVDGAEFVEDSWQREAGGGGRSRVLRNGGIFEQAGVNFSHVHGEAMPASATAHRPELAGRSFEAMGVSLVVHPHNPYVPTSHANVRFFIAEKPGAEPVWWFGGGFDLTPFYGFEEDAIHWHRTARDLCLPFGEDVYPRYKKWCDDYFYLKHRNEQRGIGGLFFDDLNTPDFDHCFAFMQAVGKGYTDAYLPIVERRKAMAYGERERNFQLYRRGRYVEFNLVWDRGTLFGLQTGGRTESILMSMPPLVRWEYDYQPKDGSPEAALSEFIKVRDWV

SEQ ID NO: 542 - protein, 299 aa, Citrobacter
MKPDAQRVKQFLLSLQDDICQRLSAVDGAEFIEDSWQREAGGGGRSRVLRNGGIFEQAGVNFSHVHGDAMPASATAHRPELAGRSFEAMGVSLVVHPLNPYIPTSHANVRFFIAEKPGADPVWWFGGGFDLTPYYGIEEDAVHWHRTARDLCQPFGEDVYPRYKKWCDDYFFLKHRNEQRGIGGLFFDDLNTPDFDRCFAFMQAVGKGYTDAYLPIVGRRKTMSWGERERNFQLYRRGRYVEFNLVWDRGTLFGLQTGGRTESILMSMPPLVRWEYDYHPEDGSPEAALSDFIQVRDWV

SEQ ID NO: 543 - protein, 299 aa, Citrobacter
MKPDAQRVKQFLLTLQESICGQLCAVDGAQFVEDSWQREAGGGGRSRVLRNGGVFEQAGVNFSHVHGDAMPASATAHRPELAGRSFEAMGVSLVVHPLNPYIPTSHANVRFFIAEKPGADPVWWFGGGFDLTPYYGFAEDAVHWHRTARDLCLPFGEEVYPRYKKWCDDYFFLKHRNEQRGIGGLFFDDLNTPDFDHCFAFMQAVGKGYTEAYLPIVERRKAMIWGERERNFQLYRRGRYVEFNLVWDRGTLFGLQTGGRTESILMSMPPLVRWEYDWQPEDGSPEAALSEFIKARDWV

SEQ ID NO: 544 - protein, 308 aa, Salmonella
MKPDAHHVKQFLLRLQDDICQTLSAVDGVNFVEDSWRREAGGGGRSRVLRNGGIFEQAGVNFSHVHGDAMPASATAHRPELAGRSFEAMGVSLVVHPHNPYIPTSHANVRFFIAEKPGADPVWWFGGGFDLTPYYGFEEDAVHWHRTARDLCQPFGDDVYPRYKKWCDDYFYLKHRNEQRGVGGLFFDDLNTPDFDHCFAFMQAVGHGYTGAYLPIVERRKAMVWGERERNFQLYRRGRYVEFNLVWDRGTLFGLQTGGRTESILMSMPPLVRWEYGYQPEEGSPEAALCEFIQVRDWVSLPDNSSVS

SEQ ID NO: 545 - protein, 299 aa, Citrobacter
MKPDAQRVKQFLLSLQDNICQQLSAVDGAEFVEDNWQREAGGGGRSRVLRNGGIFEQAGVNFSHVHGEAMPASATAHRPELAGRSFEAMGVSLVVHPQNPYIPTSHANVRFFIAEKPGADPVWWFGGGFDLTPYYGFDEDAVHWHRTARDLCQPFGDDVYPRYKKWCDDYFFLKHRNEQRGIGGLFFDDLNTPDFDHCFAFMQAVGQGYTEAYLPIVERRKAMSWSERERDFQLYRRGRYVEFNLVWDRGTLFGLQTGGRTESILMSMPPLVRWEYDWQPEANSPEAALSEFIQVRDWV

SEQ ID NO: 546 - protein, 299 aa, Rhizobium [sequence omitted]

SEQ ID NO: 547 - protein, 299 aa, Vibrio
MKPDALRVKQFLLNLQDAICQQLTAIDGAEFVEDSWQRDAGGGGRSRVLRNGGIFEQAGVNFSHVHGDAMPASATAHRPELAGRSFEAMGVSLVVHPLNPYIPTSHANVRFFIAEKPDADPVWWFGGGFDLTPYYGFEEDAIHWHRTARDLCQPFGDDVYPRYKKWCDDYFFLKHRNEQRGIGGLFFDDLNTPDFDHCFAFMQAVGEGYTEAYLPIVERRKAMSWGERERNFQLYRRGRYVEFNLVWDRGTLFGLQTGGRTESILMSMPPLVRWEYDWQPDAGSPEAALSDFIQVREWV

SEQ ID NO: 548 - protein, 299 aa, Enterobacter
MKPDAQQVKTFLLALQDSICQQLAAVDGQTFSEDNWQRDGGGGGRSRVLRNGGVFEQAGVNFSHVHGDAMPASATAHRPELAGRSFEAMGVSLVVHPHNPYVPTSHANVRFFIAEKPGADPVWWFGGGFDLTPYYGFEEDAVHWHRTARDLCLPFGEDVYPRYKKWCDDYFYLRHRQEQRGIGGLFFDDLNTPDFDRCFAFMQAVGNGYTDAYLPIVERRKAMAFGERERDFQLYRRGRYVEFNLVWDRGTLFGLQTGGRTESILMSMPPLVRWEYDYQPEDGSPEAALSEFIRVRDWV

SEQ ID NO: 549 - protein, 299 aa, Enterobacter
MTVDANKVKTFLLQLQDDICQQLSALDGGAFIEDSWQRDAGGGGRSRVLRDGGIFEQAGVNFSHVHGDAMPASATAHRPELAGRSFEAMGVSLVVHPRNPYVPTSHANVRFFIAEKPGADPVWWFGGGFDLTPFYGFEEDAIHWHRTARDLCQPFGEDVYPRYKKWCDDYFFIKHRNEQRGIGGLFFDDLNTPDFDSCFAFMQAVGNGFTDAYLPIVKRRKAAIWGERERNFQLYRRGRYVEFNLVWDRGTLFGLQTGGRTESILMSMPPLVRWEYDYQPQAGSPEAALSEFIKVRDWV

SEQ ID NO: 550 - protein, 299 aa, Enterobacter
MKPDVQQVKAFLLQLQDAICAKLSAVDGKDFVEDSWQREGGGSGRSRVLRDGGIFEQAGVNFSHVHGDAMPASATAHRPELAGRSFEAMGVSLVVHPRNPYVPTSHANVRFFIAEKPGADPVWWFGGGFDLTPYYGFEEDAIHWHRTARDLCLPYGDEVYPRYKKWCDDYFFLKHRNEQRGIGGLFFDDLNTPDFDHCFAFMQAVGNGFTDAYLPIVERRKTTPYGERERDFQLYRRGRYVEFNLVWDRGTLFGLQTGGRTESILMSMPPLVRWEYDYHPQEGSPEAALSEFIKVKEWI

SEQ ID NO: 551 - protein, 300 aa, Kluyvera
MTINVQQVKAFLLKLQDDICQQLERVDGGTFIEDSWQREAGGGGRSRVLRDGSVFEQAGVNFSHVHGDAMPASATAHRPELAGRSFEAMGVSLVVHPRNPYVPTSHANVRFFIAEKPGAEPVWWFGGGFDLTPYYGFQEDAVHWHTVARDLCLPFGEDVYPRYKKWCDDYFHLKHRNEQRGIGGLFFDDLNTPDFDHCFGFMQAVGKGFTDAYLPIVERRKAMAYGERERDFQLYRRGRYVEFNLVWDRGTLFGLQTGGRTESILMSMPPLVRWEYNYQPEEGSPEAALSEFIKVKDWLL

SEQ ID NO: 552 - protein, 299 aa, Trabulsiella
MKPDAQQVKTVLLTLQDTLCQQLSATDGSGFTEDLWQRAAGGGGRSRVLRNGGVFEQAGVNFSHVHGDAMPASATAHRPELVGRSFEAMGVSLVIHPHNPYVPTSHANVRFFIAEKPGADPVWWFGGGFDLTPFYGFNEDAVHWHTTARDLCLPFGDEVYPRYKKWCDDYFWLKHRNEQRGIGGLFFDDLNTPDFDHCFAFMQAVGNGFTDAYLPIVERRKMMPFGEREREFQLYRRGRYVEFNLVWDRGTLFGLQTGGRTESILMSMPPLVRWEYNYEPEKGSPEAALSEFLQVRDWI

SEQ ID NO: 553 - protein, 299 aa, Raoultella
MKPDAHQVKRYLLQLQETICQKLSAIDGGEFVEDSWQREGGGGGRSRVLRDGGVFEQAGVNFSHVHGDAMPASATAHRPELAGRSFEAMGVSLVVHPWNPYVPTSHANVRFFIAEKPGAEPVWWFGGGFDLTPFYGFEEDAVHWHRTAHDLCQPFGEEVYPRYKKWCDDYFYLKHRHEQRGIGGLFFDDLNTPDFDHAFAFMQAVGNGYTDAYLPIVEQRKAMPYGERERNFQLYRRGRYVEFNLVWDRGTLFGLQTGGRTESILMSMPPLVRWEYDYQPEEGSPEAALSEFIQVREWI

SEQ ID NO: 554 - protein, 299 aa, Kosakonia
MTPEIAPVKNALLALQDKICRQLSDIDGATFVEDAWQRAEGGGGRSRVLRDGGVFEQAGVNFSHVHGDAMPASATAHRPELAGRSFEAMGVSLVVHPRNPYVPTSHANVRFFIAQKPGADPVWWFGGGFDLTPYYGFEEDAIHWHRTARDICLPFGEEIYPRYKKWCDDYFYLKHRNEQRGIGGLFFDDLNTPDFDHCFAFMQAVGNGYLDAYLPIVARRKALPYGERERDFQLYRRGRYVEFNLVWDRGTLFGLQTGGRTESILMSMPPLVRWEYNYQPAEGSPEAALSEFIQVKDWV

SEQ ID NO: 555 - protein, 299 aa, Enterococcus
MKPDAAQVKTFLLQLQDNLCQQLSAVDGAPFIEDAWQREGGGGGRSRVLREGRVFEQAGVNFSHVHGDAMPASATAHRPELAGRSFEAMGVSLVVHPLNPYVPTSHANVRFFIAEKPGADPVWWFGGGFDLTPYYGFEEDAVHWHRTARDLCLPFGEEVYPRYKKWCDDYFYLKHRQEQRGIGGLFFDDLNTPDFDHCFAFMQAVGNGYADAYLPIVERRKATPYGERERHFQLYRRGRYVEFNLVWDRGTLFGLQTGGRTESILMSMPPLVRWEYDYQPEPGSPEAALSEFIQVRDWL

SEQ ID NO: 556 - protein, 307 aa, Unknown
  gamma proteobacterium
MNQLPDINQVKAFLLSLQDQICQKLSAVDGRAQFKQDQWVREEGGGGQSRVLTGGAIFEQAGVNFSHVSGATLPASATAHRPELAGRSFQAMGVSLVIHPLSPYIPTSHANVRFFIAEKPGEAPVWWFGGGFDLTPYYGFEEDARHWHQTAADLCQPFGDDVYPKYKKWCDDYFFIKHRNEARGIGGLFFDDLNSPDFAHCFAFMQAVANGFTDAYLPIVERRKTLTWGEREREFQLYRRGRYVEFNLVWDRGTLFGLQTGGRTESILMSMPPLVRWEYGFEPDENSPEAALYRDFLPVRDWLAESE

SEQ ID NO: 557 - protein, 303 aa, Shewanella
MKPDATQVKAFLLDLQQRICEGLEQLDGEAKFVADSWEREEGGGGTSRVLTKGKVFEQAGVNFSHVTGAAMPASATAHRPELAGRSFEAMGVSLVIHPNNPYVPTTHANVRFFIAEKEGADPVWWFGGGFDLTPYYPFEEDVVAWHQSAKALCEPFGEDVYPKYKKWCDEYFFLPHRNETRGVGGLFFDDLNEPGFENSFAFMQAVGEGFLKAYAPIVEKRKETAYGERERDFQLYRRGRYVEFNLVYDRGTLFGLQTGGRTESILMSMPPLVRWQYAYTPEAGSPEAKLYSDFLKPREWLEA

SEQ ID NO: 558 - protein, 302 aa, Oceanimonas
MSSKPDTSAVKAFLLALQDNICRQLEQADGSGRFIEDSWTREEGGGGRSRVLRNGTVIEQGGVNFSHVYGAAMPASATAHRPELAGRSFEAMGVSLVIHPHNPHVPTSHANVRFFIAEKEGAEPVWWFGGGFDLTPFYPVEEDCRHWHQVSKDLCEPFGEDVYPKYKEWCDRYFYLKHRNETRGVGGLFFDDLNEWPFERCFAFMKAVGEGYLDAYLPIIARRKDTPYGEDERQFQLYRRGRYVEFNLVYDRGTLFGLQTGGRTESILMSMPPLARWEYDWQPEAGSREARLQAFLVPRSWV

SEQ ID NO: 559 - protein, 302 aa, Chromobacterium
MSHPHSDAVKAILLDLQDRICAALEGADGDGRFVEDAWQREAGGGGRSRVLSNGAVFEQAGVNFSHVHGDALPASATAHRPELAGRRFEAMGVSLVIHPHNPHVPTSHANVRFFIAEKAGEAPVWWFGGGFDLTPFYPVREDVVHWHTVARDLCAPFGPEVYPRYKKWCDEYFYLKHRNEARGVGGLFFDDLNEWGFDQSFAFMQAVGNGYLDAYLPIVQARKDTAWGARERQFQLYRRGRYVEFNLVWDRGTLFGLQSGGRTESILMSMPPLVRWEYGYQPEPGSAEALLYTDFLPPRDWV

SEQ ID NO: 560 - protein, 302 aa, Pseudogulbenkiania
MSHPHSDAVKSFLLDLQDRICAALEQADGKAQFAEDAWSREAGGGGRSRVLAGGGVFEQAGVNFSHVHGDALPASATAHRPELADRRFEAMGVSLVIHPSNPHVPTSHANVRFFIAEKDGEAPVWWFGGGFDLTPYYPQEEDAVHWHTVARDLCAPFGGEVYPRYKKWCDEYFHLKHRNEARGIGGLFFDDLNEWGFDKSFAFTRAVGDGYLDAYLPIVARRKEQAWGDRERQFQLYRRGRYVEFNLVWDRGTLFGLQSGGRTESILMSMPPLVRWEYGYQPEPGSPEARLYTDFLPPRDWV

SEQ ID NO: 561 - protein, 302 aa, Chromobacterium
MSHPHSNAVKSFLLDLQDRICAALEQADGKAQFAEDAWSREAGGGGRSRVLTGGEVFEQAGVNFSHVHGDALPPSASAHRPELAGRRFEAMGVSLVIHPSNPHVPTSHANVRFFIAEKDGEAPVWWFGGGFDLTPFYPQEEDAVHWHTVARDLCAPFGGDVYPRYKKWCDEYFHLKHRNEARGIGGLFFDDLNEWGFDKSFAFTRAVGDGYLDAYLPIVARRKEQAWGDRERQFQLYRRGRYVEFNLVWDRGTLFGLQSGGRTESILMSMPPLVRWEYGYQPEPGSPEARLYTDFLPPRDWV

SEQ ID NO: 562 - protein, 302 aa, Aeromonas
MSKPDVAQVKAFLLQLQDEICRGLELADGVGHFVEDAWLREGGGGGRTRVLRHGAVIEQGGVNFSHVHGDAMPASATAHRPELAGRRFEAMGVSLVIHPHNPYVPTSHANVRFFIAEKEGEEPIWWFGGGFDLTPFYPFEEDVRHWHQVSRDLCQPFGTDIYPEFKSWCDRYFFLKHRDETRGVGGLFFDDLNRWPFADCFAFMQVVGKGYLDAYLPIVERRKALAYGEREREFQLYRRGRYVEFNLVYDRGTLFGLQTGGRTESILMSMPPLARWEYDWQPPAGSPEALLYSDYLKPREWL

SEQ ID NO: 563 - protein, 310 aa, Glaciecola
MNTELPSHEKIAQVKAFLLKLQDNICQTLELSDGKARFVEDEWEREQGGGGRTRVLTNGAVIEQGGVNFSHVFGDQMPASATAARPELAGRRFQAMGVSLVIHPHNPYIPTSHANVRFFIAEKEGEAPIWWFGGGFDLTPFFPFKEDVVHWHKVAHDLCLPFGEDVYPKYKKWCDDYFYLKHRNETRGVGGLFFDDLNTPDFETAFGFMQAVGNGYLDAYVPIIEKRKNTEYGNMERDFQLYRRGRYVEFNLVYDRGTLFGLQTGGRTESILMSMPPLVRWEYNYVPDEHSAQGKLAAYLTPQDWLAGQS

SEQ ID NO: 564 - protein, 304 aa, Alteromonas
MDGKNAAEVIEQVKSYLLGLQDTICQTLELADGKGQFVEDSWQREEGGGGRSRVLKNGAVIEQGGVNFSHVFGSQMPASATANRPELAGRNFQAMGVSLVIHPHNPYIPTSHANVRFFIAEKEGEAPIWWFGGGFDLTPFYPFKDDVVHWHDTAKKLCKPFGEDVYPKYKKWCDEYFYLKHRNETRGVGGLFFDDLNEWGFEQSFAFMQAVGNGFIDAYVPIVERRKQTDYGERERDFQLYRRGRYVEFNLVFDRGTLFGLQTGGRTESILMSMPPLARWEYCYTPAPGSAEAKLTDWLKPTPW

SEQ ID NO: 565 - protein, 305 aa, Gilvimarinus
MTTTPDKHAVKAYLMDLQERICDSLAAVDGGRFAEDTWQRAEGGGGRSRVLADGAVIEKGGVNFSHVMGDAMPASATAHRPELAGRSFEAMGVSLVIHPANPYAPTSHANVRFFIAEKEGADPVWWFGGGYDLTPFYGFVEDCVHWHKTAFEACAPFGDDVYPRYKNWCDEYFYLKHRNEARGVGGLFFDDLNELGFDQSFAFMRAVGDSYLQAYRPILERRKDSPYGEREREFQLYRRGRYVEFNLVYDRGTLFGLQTGGRTESILMSLPPLVRWEYDFHPEPDSPEARLSRDFLPHQDWLARQ

SEQ ID NO: 566 - DNA, 453 bp, Acinetobacter
atggatgcaccttctgatgctttcttatgggtaaaagcattacatattattgccgtagtatgttggtttgctgccttattctatttacctcgactctatgtttaccatgccatgagtgaggatgacactagtcatcgtcgttttgaagtcatggagcgtaaactttatcgtgggattatgtggccttctatgattgcgacactgatcactgctcattttttggtagattggggcgatgcaacacgacattatcatgaagcactctggttttatatcaaagtcggattggtgggacttttagttatctatcattttgtttgcggctactaccgtaaaaaactgattggcaatgcccattataaatcacacaaattctggcgttattttaatgaaatgccgacactgattttatttgcagtcgtgatcctggtcgtggtcaaaccacaattttaa

SEQ ID NO: 567 - DNA, 1365 bp, Calditerrivibrio
ttatttgtttaagagatttttaaatctatccacattcataaagcttgttctggtgcaatcatttatacccacaccatataagatattaccaccgataaaaatgtcatcaaattttttatagaactcttcaaccttttcaactattttgtggtgcccgatgtagtactgggggattgctttttcccatctaaaatattttattttgtaaggctctctttttatttttaaagtttcttttatgtcatcgaaagccatcctgataagttcatcgtcggatttttcaattatccatctatttttatctccacccattatcgttctaacgattttgtatccatcccttgttctatcagggaatatcgaagaatcaaacagtgctcccaaaattcttttattctctgaatggggtatcagatagccgaagccatccagaggatcttccagatcctccggcttgaatataaacccagcaacaaaaacaggagggtaagtgatgttatttagatccctggatagatctttatcaagaactgagagcatttgggaaacagcataggccggggcatttatgaatattttatcgaactccatgatgcctttattggtatttaatatatatctgtttatttttttatctattgaaaatacttccgtattcaacatctttgtgatgcttgtggattcgagtaaatctgttatcatattatccagtccatttttgtatgaagtaaggattccgccggggcctgatgggccactttttttcccttttttctttatcatccctttaaaaaggccaccataatttatttccagatcccttattacggggaaacaggatcttaagctcatcttttcgggatcacctgcaaaaatgccagagaccattgggctgataaggtattcaagagcttctttccccaatcttcttctggcaaagtctgccacagattcatcttcaaggacacttttttgtatgaaatattcggatagtatcctcatttttgctgagaaggagagtagcttagttttgaaaaacattggtggattttcaggtaatctatgtaaaatcccattgcgcatgatatatctttttcttgctaagtcattacttttgacaagattgttgcttaatcctgccattgatagaagttcaagggtatggggtttgctgtctaaaaaaccatttggccctgcttctactatgaacccatcttcccgtgaggtctctattgaaccgccccacctcaatctcttttctatgattgttatttccatatccagattcagttcatttttcaaattttccaataaaaaagcggtggatatccctgatattccgcctcctattatggctactctcat

SEQ ID NO: 568 - DNA, 1488 bp, Candidatus
atggcgacggaacagcacagcggcagcaggcgtatcgtggtggtggggagcggcatcgcgggtctggctgccgcctatcggctgcaggagcggtgcgagcaggacggcccgccttgcgaggtgcgcgtattggaggccgctgcacggcccggcggtgcgatcagtaccacgcaccgggatggttttgttcttgaatctgggcccgataccattttcaccgataagccgtggggattggatctgatcagacgcctcggtctgagcgagcaggtcatcgggaccaatgaggcgcaccgccggacctttgttgtgcgggacggcgcactgcacccgctgcccgaagggttcgccttgatggggccgaccaagccttggccgtttctgcaatcagggctgctgtcatggcgcggcaaggcaagggcggctctggacctggtactgccgcgagggggaccatccgacgacgagagcctggcgtcgttcgttcggcgtcgtttcggacaggagtttctcgatcggctggcccaaccgatgatcggtggaatctatggcgccgacccggagcggttgagtctgcgcgctaccttcccgcagtttctgcagatggaagcgacgcatcgcagcgtgatcctcggcctgcgacgaatgcgccccgccggccgcggcgtaggtcataccagcagcggcccgcgctatggcctgtttgtcacgctggatcacgggctgcaggccctcgtcgatgccatggtaaaaaggctgccggctgggacgctgcgtctccgcgcgccggttgatagaatcgcgcacacagagcaaggctggaccgttcgacttggagacggcgcgagcctgcaggccgatggccttattctcgccgtccccgcatttgagattgccaggcttacccacgacctggaccaagacctggctcgtcagctcgaggccatgccctacgcctcttcggtcacgatcaatctggcctatcgtagagaggcgatccaccatccgctcgacgggtttggatttgtggtgccggcctgcgaggggcgcaccatcattgcctgttcgttcagcagcgtgaagttcgctcatcgggcgccggccggtcacgtcctgctgcgtgccttcgcgggcggcgcgctgcagccggagccgttcacctgggatgacgagacgctgctgagcgcagtgcgccgcgatctggaggagctgctggcgattcacgcgccgcctttgtggagccagttggtccgacatcctcgtgtgatgccccagtaccaggtcggccacctgggccggttggcggcgctcgaagagacgcttcggcggtggccgaccctcaagctgaccggtaacgcctacagaggtgtcggtgtgccggatgtggttcacagcggggagacggccgccgattcattattggcagagctggccccgtcaccgaccgagccgacccccgcttgtaccgaaggcgattctcgcctataa

SEQ ID NO: 569 - DNA, 1425 bp, Chloroflexus
atgatggcgggatacgacagtgtagtgattggcggtggcattgccggtttagctgcggcttacacgctccacaagcgtggttatcgggtcctggtcatcgagtcgaccaatcgcgttggcggtgtgatccagaccatcaccacaccagaaggctacattctcgattgtgggccgaacacggtgggtaccggcgatgcgcgattgtggcaggaactgatcgatctgggtctgcgcgagcggatcacaccggcagcgccatgtagcaaacggcggttcatcctgatcaatggtacaccggttgaaatcccaacctcaccagtcgggctgattaccacgcgattactctcgtggcgggggaaattgcgggtactggccgaaccgttcatcaaccgtggatcgaccgatcccgatgaaagcgttgctgccttcttcacccgccggattggtgcagaggctaccgcccacctcctcgatccatttgttgccggcgtctacgctggcgatccgcaacggctctcgactgcggcagtctttccatcactgtgggaagcggcccagcgcagtggcagcatcgtgcgcggcatgctgagcaaacccaaaccgaagactcaggtgagtgagccaaagatgcgcagccgcacctttaccttccgcggtggcctggccgaatggccacgcgctctggcgcaagccctgggtgccggcaatgtctggacagaacggcgcgtggtcaagctccaaccacgcgactcctggtgggaagtgacgattgatggtgtgaacggcccggagacactcatcagtcgcagcctcattatcgccaccccagcctttacggcggctgatctcattgagtcggttgatcaaagagcggctggtgccctacgcggcattccgtatgcgccggtagcagtggtacatctcggctttcgtcgtgaccagatcagccaggaattgagcggctttggtgtgctggccccctcaagcgaacagcgtcagttcctcggcattctctggacatcaagcatcttcccgcacgttgcaccacacgatcatgtcctcaccacaaccctcagtggtggtgctatccggcccgaactggccgaacggagtgacgaaacactgattgaagcggccattcgcgatcatcaccagctcctggggatcagagggcaaccgatcttcacccatgttactcgctggcgaaccgccattgcccagtatacctttgggcaccgcgagcggattgccaccctcgtgcaactcgaacagcgcctgccgaccatccagtttgccggcagctaccgcgacggcgttggagtgcccaaaacctgggccagcggtgtgcaggcaggcgagcggatcgctgcggcactggcagcccatggaactaccgcagtttccacagagacggcgtcggggtga

SEQ ID NO: 570 - DNA, 546 bp, Escherichia
gtgaaaacattaattcttttctcaacaagggacggacaaacgcgcgagattgcctcctacctggcttcggaactgaaagaactggggatccaggcggatgtcgccaatgtgcaccgcattgaagaaccacagtgggaaaactatgaccgtgtggtcattggtgcttctattcgctatggtcactaccattcagcgttccaggaatttgtcaaaaaacatgcgacgcggctgaattcgatgccgagcgccttttactccgtgaatctggtggcgcgcaaaccggagaagcgtactccacagaccaacagctacgcgcgcaagtttctgatgaactcgcaatggcgtcccgatcgctgcgcggtcattgccggggcgctgcgttacccacgttatcgctggtacgaccgttttatgatcaagctgattatgaagatgtcaggcggtgaaacggatacgcgcaaagaagttgtctataccgattgggagcaggtggcgaatttcgcccgagaaatcgcccatttaaccgacaaaccgacgctgaaataa

SEQ ID NO: 571 - DNA, 900 bp, Escherichia
atgaaacccgacgcacaccaggttaaacagtttctgctcaaccttcaggatacgatttgtcagcagctgaccgccgtcgatggcgcagaatttgtcgaagatagttggcagcgcgaagctggcggcggcgggcgtagtcgggtgttgcgtaatggtggtgttttcgaacaggcaggcgtcaacttttcgcatgtccacggtgaggcgatgcctgcttccgccaccgctcatcgcccggaacttgccgggcgcagtttcgaggcgatgggcgtttcactggtagtgcatccgcataacccgtatgttcccaccagccacgcgaatgtgcggttttttattgccgaaaaaccgggtgccgatcccgtctggtggtttggcggtggcttcgacttaaccccattctatggttttgaagaagatgctattcactggcatcgcaccgcccgtgacctgtgcctgccatttggcgaagacgtttatccccgttacaaaaagtggtgcgacgaatacttctacctcaaacatcgcaacgaacagcgcggtattggcgggctgttctttgatgacctgaacacgccagatttcgaccgctgttttgcctttatgcaggcggtaggcaaaggctacaccgacgcttatttaccaattgtcgagcgacggaaagcgatggcctacggcgagcgcgagcgcaatttccagttatatcgtcgcggtcgttatgtcgagttcaatctggtctgggatcgcggcacgctgtttggcctgcaaactggcgggcgcaccgagtctatcctgatgtcaatgccgccactggtacgctgggaatatgattatcagccaaaagatggcagcccagaagcggcgttaagtgagtttattaaggtcagggattgggtgtaa

SEQ ID NO: 572 - DNA, 1326 bp, Hydrogenobacter
atgatagatgtagcggtagtaggggcaggtatatccgggctatccatagcctatcaccttaaaaaggctggacttgaggtaaaggtttttgaaaaagaagatgccgtaggtggaaacatacaaacagcatacatagacggttatgtttgcgagcttggacctcagaccattcttgcggacagtaaagtagaagagtttttaaaagatgcaggtataaagcccatatatgccaatccttcttccaaaaagagatacatatacaggaagggtaagttggtggctcttcctctatcacccgtagaatttctcttatcaccttttctgtccctcggcggaaagctaagagtcctcaaagagccttttgttccaaggtctcccaagcaggaagaaagtatagcggagtttgtcagaaggcgttttgggagggagtttttagattatgtagtagctcctttcgtgtctggagtttacgctggagacccagaggagctatctgttaaatacgcagttagaaaggtttacgagctggagcaaaagtacggaagcgttataaagggagccataaagctcaaagctcttggtccatcgggaaagctcatatcctttgaaggaggaaatgcaactcttataagaaagctctctgaaagtttagaggttcataaagagaatgtggttctgaggataaggagaaaggacgatatttttatcctagataccaaggaggggaaggttacggctaaggcggttgtagtttctactcctgccacatctacaggttatctgctcagggatctgtcttggagcatatccgaggagtttgacaaaatatactacgctcctgttctggtggtgcatgtggcagtaaagtttggtgttctgccagaaggctttggttttttagtgccaaaaaaggaaaacaaaaggatactgggggtgatcttttcatctaatctttttgaaggaaggagtccagagggcaagagtcttatcaccgtatatattggtggtgccacagacccagaaataatagaatacgaagatgaagccattgtaagtgtgctggagagggaactaagagagaccgtagatataagagactgggatcttttaaaaataacgcgctggaaaaagggtataccccaatacactgtggggtacggaaggtatcttgagctggcaaactccatagagatggagcaacccggacttttcttgagtggcaattatctttatggtgtttccgttgcagactgtataagagtttcacatcacatagcaaagagggtaatagactttttggaagttaaggggcgtactgttgtataa

SEQ ID NO: 573 - DNA, 1323 bp, Laribacter
tcagctggccggcgggtagtccagcaagcactggacagccacctgctgccccttgtcgagacagtcgacgaccgataccccgccatgccagttggcacacacgcggataccgtgttcatgcaggtcactgaccgcgctggccagcggcagggcatggctgtcgtactgcggaatggcctgctcctgacgggtcagccggcaaagggtcggctcgccctggatgcggtagagccgccgcagttcttccagcgccagcgccaccagcgtggcgtcatcgtgccggtaacggtcaaggaactgcatgccgccgacaaaggtggtcagcagggtttcgcctgccggcgtgcggtcgggaaacagcgagccggaccagatggagccggcggcaaacggtttttcgactttggggttcagcccgccaaaaccgtcgaggtcatgcccgaccgtgctgcgtggccaggccgtatgcaggacggccaccggggcgtaggttacgttggcaaggttcgctgcaatggccggaaaatggctggccagcagttgcccggccacgtcggccggcacggccagcaccacttcgtcggcgtccagttcacctgctggggttctgacccgccagccggtttccagccgctccagtgcctgcaccgacgtatccagccgtacgtccagcccctgcgccagcgtttcgggcagctgctgcaaaccctcgttcagggtgaaggtggccttgcgccggaaggttttgcggcgggcaaacatgccgcgcacgatggagcctgactggcgctcggcttcgtggatgaccggcagcgtcagtccggccaccagctcttcgggatcaccggcaaaaatgccgccgacaaacggcgaaatggcccgctcgacaaattcgtcgcccagacgacgccggaaaaaggcagccacggtttccggctcacgcaccggccggttgcgccggaaaggctcggtcagcgccagccatttgctccgggcaccgaactgcgatccggtcaggaacgacagcggtccggacggcagggcctcgtagcgatcgccgcgcagcacgaaacggtgccggaccacggccgccgccggccggatggctgccgtgaggcccagccgttccagaaggtccagatgcccggcatggccgtaaagggtattggggccgagttccagccggtaaccgtcggccgctaccgtcccgatcttgccgccgacccggctgccggcctccagcaccacgacggggatgccccgctgttgcaggtgccaggcacacgacaggccggaaatgccggcaccgatcaccaccaccat

SEQ ID NO: 574 - DNA, 1404 bp, Opitutus
ctattgcccggcgcgttccgccagtttttcgccggccgcgatgcaggccgggacggcgatcccgtcgcgggcctgtccccccatgaacagtcccggatggaagcgttcgccggcggcaagagcggcgatgaagtgctcgtgaccgaggttgtactgcgggatggcgcgaggccagaagttgtgccggacaaaaaccgggtcgccgctgacgccgagcaactgcgtgagatcgggccgcacggcggcaagcagctgatcggcgggcaggctggcgagttgcggctggcgtgttccgcccaccatcaccgtcagcgccacgtgtcccagcggcgcgcggcccgggaacagcgaggacgagaacagcacgccaaggaccgagcgcttctcgacggccggcacgagcacgccgaacccgtcgagcggatgcgcgacctgctcgcggcggaagccgaggaagagcgacgagaccggcgggtgttcgatcagcgccagcgcggcgagcggcttttcgccgagcgtgccgatctggagtcgcgcgagggcgggcgcgggcagcgcgaccacgacgctgtcgaagctttgcgtgtgcgtcgccacgtcgtcgtgccaaaccacgttccacttgtcgccgggcacgatggcgtcgagcgaagcgccgagtgtgatggcgccggcggggagacgcgcggcgagcgcctccggcagcacgtgcaggccgtgtttgaaggaaaagatgccggggcgcggctcaccgcgggccttccgggctttggccgcggcgatctggccgcggatcagcgagccgtgggtttgttcgatttcccagagcttggggaacgactgccgcgcggagagcttttcgggatcgccggcatacacgccgcccacgaacggattgagcgcgtagtcgacgaactcgcgcccgaagtgcgactcgacgaattcggcgaggctgacgtcggtcgtgcggacgcgccgccgggcgaacagctcggcgaggagcttgaacttggcgacgggcgaaaacagtgaggaggcgaagaacgacggtggggacatcggcgcggccagcgcgcggccgcggcgaacgatgtagcggtttttcgcggcgggatccgcggcgatgcgttcgccgttcagcccgagttcgtcgatgagcttgtcgacggcgagttcgccggagagcagcgtgttgggtccgccttcgatcagccagccgtcgacttcctccgtcttgatcgagccgccgacgcggtcggattgctcgaacacgcgcaccttgtggccgagctgggtgagccggtgggcggcggtgagcccggtgatgccggcgccaagcacggcgaacgttttgggcggccggcctgaggcggtggcggaaggattaaaaggcgaggtgctcat

SEQ ID NO: 575 - DNA, 1410 bp, Rhodothermus
atggcttctgtgggaatcatcggagccggcattgccggtctgacggccgcctacgaactgcaccgtcgtggcctggaagtgacggtctttgaagccaccgaccgcatcggcggcttcattcagtcggagcggatcgacggctttctggtggagctcggtcctcagacgctccagcgcacctcgggcgacttcgaagagttgctgcgacaggtggatctggaggacgcgtgcattccggcccgaccggtcgcggcgaatcgcttcatcgtgcggggtggccagccgatacccctgccacgctcgccgcgcgaactgctgcgcacgccgctgctttcgccccgggcgcgcctgcgcctgctggccgagccgttcattcaccgggcccaccggagcaccgaggaaagcgtggccaaattcacccggcgtcgactgggtccggaggtgctcgactatctggtagagcccttcgtggccggcatctttgcgggcgatcccgagcagctttcggtgcgctacgccttcccgaaactgttcgaactggagcagcagtacggctcgcttttctggggcctgatccgcgatcggatgaagcagcggtatcatccggccccgcgccgctcgatgttctcgtttgtcgagggcctgcacatgctgccccgggcgctggccgagcggttgcccgcgcacgcgatcgtgcgcaacgcggaggtgctggccatccgctgggacgagaaaaacccctggacgctcacgttccggcagcacggccgcgcttcgacccgttttttcgatatcatcgtctgtgccgtgccgctacaccggctggcgcaactccggattcatcccccggtggatcgccggccgctcagcaccgtcgagcacccgcccattgcgctggtggcgctgggcttccggcgcgagcaggtggcccatccgctggacggcttcgggatgctggtaccggccgtggagcgcgactttcagattctgggcacgctgttctcctcgtcgctctttccggaccgggcgcccgaaggccacgtgctgctgaccacgttcgtcggcggcatgcggcatcccgaactggcgttgctgcccgaagatcggctggaggcgctggtgctgcaggacctgcgccggctgctgggcatctcgggcgcgccggtcttccggcacgtgtggcgctgggagcgctcgatcccgcagtaccggctgggctacgatgcggtgctcgcctgcgttcacgatgtggaaatgagccgctccggtctgtttctggccggcaactacatggaaggcatctccgtgatcgacgcgctccataccggcctgaaggccgcccgcgcgatcatccagcacctgcgcgaagaagcagccggcggtctggccaagctggtgctgggagattga

SEQ ID NO: 576 - skipped

SEQ ID NO: 577 - protein, 534 aa, Amaranthus tuberculatus; identical to SEQ ID NO: 1

SEQ ID NO: 578 - skipped

SEQ ID NO: 579 - protein, 534 aa, Amaranthus tuberculatus; identical to SEQ ID NO: 2

SEQ ID NO: 580 - skipped

SEQ ID NO: 581 - protein, 533 aa, Amaranthus tuberculatus; identical to SEQ ID NO: 3

SEQ ID NO: 582 - skipped

SEQ ID NO: 583 - protein, 533 aa, Amaranthus tuberculatus; identical to SEQ ID NO: 4

SEQ ID NO: 584 - skipped

SEQ ID NO: 585 - protein, 547 aa, Arabidopsis thaliana; identical to SEQ ID NO: 25

SEQ ID NO: 586 - skipped

SEQ ID NO: 587 - protein, 548 aa, Nicotiana tabacum
MTTTPIANHPNIFTHQSSSSPLAFLNRTSFIPFSSISKRNSVNCNGWRTRCSVAKDYTVPSSAVDGGPAAELDCVIVGAGISGLCIAQVMSANYPNLMVTEARDRAGGNITTVERDGYLWEEGPNSFQPSDPMLTMAVDCGLKDDLVLGDPNAPRFVLWKGKLRPVPSKLTDLPFFDLMSIPGKLRAGFGAIGLRPSPPGHEESVEQFVRRNLGGEVFERLIEPFCSGVYAGDPSKLSMKAAFGKVWKLEETGGSIIGGTFKAIKERSSTPKAPRDPRLPKPKGQTVGSFRKGLRMLPDAISARLGSKLKLSWKLSSITKSEKGGYHLTYETPEGVVSLQSRSIVMTVPSYVASNILRPLSVAAADALSNFYYPPVGAVTISYPQEAIRDERLVDGELKGFGQLHPRTQGVETLGTIYSSSLFPNRAPKGRVLLLNYIGGAKNPEILSKTESQLVEVVDRDLRKMLIKPKAQDPLVVGVRVWPQAIPQFLVGHLDTLSTAKAAMNDNGLEGLFLGGNYVSGVALGRCVEGAYEVASEVTGFLSRYAYK

SEQ ID NO: 588 - skipped

SEQ ID NO: 589 - protein, 555 aa, Cichorium
MTSLTDVCSLNCCRSWSSLPPPVSGGSLTSKNPRYLITYSPAHRKCNRWRFRCSIAKDSPITPPISNEFNSQPLLDCVIVGAGISGLCIAQALATKHASVSPDVIVTEARDRVGGNISTVERDGYLWEEGPNSFQPSDAMLTMVVDSGLKDDLVLGDPTAPRFVLWGGDLKPVPSKPADLPFFDLMSFPGKLRAGFGALGFRPSPPDREESVEEFVRRNLGDEVFERLIEPFCSGVYAGDPSKLSMKAAFGKVWNLEQNGGSIVGGAFKAIQDRKNSQKPPRDPRLPKPKGQTVGSFRKGQAMLPNAISTRLGSRVKLCWKLTSISKLENRGYNLTYETPQGFESLQTKTIVMTVPSYVASDLLRPLSLGAADALSKFYYPPVAAVSISYPKDAIRADRLIDGQLKGFGQLHPRSQGVETLGTIYSSSLFPNRAPPGRVLLLNYIGGATNPEILSKTEGEIVDAVDRDLRTMLIRRDAEDPLTLGVRVWPRAIPQFLIGHYDILDSAKAALSSGGFQGMFLGGNYVSGVALGKCVEAAYDVAAEVMNFLSQGVYK

SEQ ID NO: 590 - skipped

SEQ ID NO: 591 - protein, 562 aa, Spinacia
MSAMALSSTMALSLPQSSMSLSHCRHNRITILIPSSSLRRRGGSSIRCSTISTSNSAAAANYQNKNIGTNGVDGGGGGGGVLDCVIVGGGISGLCIAQALSTKYSNLSTNFIVTEAKDRVGGNITTMEADGYLWEEGPNSFQPSDAVLTMAVDSGLKEELVLGDPNSPRFVLWNGKLRPVPSKLTDLPFFDLMSFPGKIRAGLGALGLRPSPPAHEESVEQFVRRNLGDEVFERLIEPFCSGVYAGDPSKLSMKAAFGRVWVLEQKGGSIIGGTLKTIQERKDNPKPPRDPRLPKPKGQTVGSFRKGLSMLPTAISERLGNKVKVSWTLSGIAKSSNGEYNLTYETPDGLVSVRTKSVVMTVPSYVASSLLRPLSDVAAESLSKFHYPPVAAVSLSYPKEAIRSECLIDGELKGFGQLHSRSQGVETLGTIYSSSLFPGRAPPGRTLILNYIGGDTNPGILDKTKDELAEAVDRDLRRILINPNAKAPRVLGVRVWPQAIPQFLIGHFDLLDAAKAALTDGGHKGLFLGGNYVSGVALGRCIEGAYESAAEVVDFLSQYSDK

SEQ ID NO: 592 - skipped

SEQ ID NO: 593 - protein, 531 aa, Spinacia; identical to SEQ ID NO: 7

SEQ ID NO: 594 - skipped

SEQ ID NO: 595 - protein, 557 aa, Solanum tuberosum
MTTTAVANHPSIFTHRSPLPSPSSSSSSPSFLFLNRTNFIPYFSTSKRNSVNCNGWRTRCSVAKDYTVPPSEVDGNQFPELDCVVVGAGISGLCIAKVISANYPNLMVTEARDRAGGNITTVERDGYLWEEGPNSFQPSDPMLTMAVDCGLKDDLVLGDPDAPRFVLWKDKLRPVPGKLTDLPFFDLMSIPGKLRAGFGAIGLRPSPPGYEESVEQFVRRNLGAEVFERLIEPFCSGVYAGDPSKLIMKAAFGKVWKLEQTGGSIIGGTFKAIKERSSNPKPPRDPRLPTPKGQTVGSFRKGLRMLPDAICERLGSKVKLSWKLSSITKSEKGGYLLTYETPEGVVSLRSRSIVMTVPSYVASNILRPLSVAAADALSSFYYPPVAAVTISYPQEAIRDERLVDGELKGFGQLHPRSQGVETLGTIYSSSLFPNRAPNGRVLLLNYIGGATNTEIVSKTESQLVEAVDRDLRKMLIKPKAQDPFVTGVRVWPQAIPQFLVGHLDTLGTAKTALSDNGLDGLFLGGNYVSGVALGRCVEGAYEIASEVTGFLSQYAYK

SEQ ID NO: 596 - skipped

SEQ ID NO: 597 - protein, 535 aa, Zea mays
MVAATATAMATAASPLLNGTRIPARLRHRGLSVRCAAVAGGAAEAPASTGARLSADCVVVGGGISGLCTAQALATRHGVGDVLVTEARARPGGNITTVERPEEGYLWEEGPNSFQPSDPVLTMAVDSGLKDDLVFGDPNAPRFVLWEGKLRPVPSKPADLPFFDLMSIPGKLRAGLGALGIRPPPPGREESVEEFVRRNLGAEVFERLIEPFCSGVYAGDPSKLSMKAAFGKVWRLEETGGSIIGGTIKTIQERSKNPKPPRDARLPKPKGQTVASFRKGLAMLPNAITSSLGSKVKLSWKLTSITKSDDKGYVLEYETPEGVVSVQAKSVIMTIPSYVASNILRPLSSDAADALSRFYYPPVAAVTVSYPKEAIRKECLIDGELQGFGQLHPRSQGVETLGTIYSSSLFPNRAPDGRVLLLNYIGGATNTGIVSKTESELVEAVDRDLRKMLINSTAVDPLVLGVRVWPQAIPQFLVGHLDLLEAAKAALDRGGYDGLFLGGNYVAGVALGRCVEGAYESASQISDFLTKYAYK

SEQ ID NO: 598 - skipped

SEQ ID NO: 599 - protein, 544 aa, Zea mays; identical to SEQ ID NO: 31

SEQ ID NO: 600 - skipped

SEQ ID NO: 601 - protein, 563 aa, Chlamydomonas
MMLTQTPGTATASSRRSQIRSAAHVSAKVAPRPTPFSVASPATAASPATAAARRTLHRTAAAATGAPTASGAGVAKTLDNVYDVIVVGGGLSGLVTGQALAAQHKIQNFLVTEARERVGGNITSMSGDGYVWEEGPNSFQPNDSMLQIAVDSGCEKDLVFGDPTAPRFVWWEGKLRPVPSGLDAFTFDLMSIPGKIRAGLGAIGLINGAMPSFEESVEQFIRRNLGDEVFFRLIEPFCSGVYAGDPSKLSMKAAFNRIWILEKNGGSLVGGAIKLFQERQSNPAPPRDPRLPPKPKGQTVGSFRKGLKMLPDAIERNIPDKIRVNWKLVSLGREADGRYGLVYDTPEGRVKVFARAVALTAPSYVVADLVKEQAPAAAEALGSFDYPPVGAVTLSYPLSAVREERKASDGSVPGFGQLHPRTQGITTLGTIYSSSLFPGRAPEGHMLLLNYIGGTTNRGIVNQTTEQLVEQVDKDLRNMVIKPDAPKPRVVGVRVWPRAIPQFNLGHLEQLDKARKALDAAGLQGVHLGGNYVSGVALGKVVEHGYESAANLAKSVSKAAVKA

SEQ ID NO: 602 - skipped

SEQ ID NO: 603 - protein, 577 aa, Polytomella
MSSSALRLLCGRTSFFNLCQKYPPSFLSQLSTLNFSTHSPFDSTYDVVVVGAGISGLSTAQALSIQHKIDNVLVTEADHRVGGKITTKRNKDFLWEEGPNSCLMNDALYRAARDAGVESKILSADPKLPRWILWGRRLRVAPIGSYALKSDLLSTQGLLRAIRGVTGFGVSPAPPKGQEESVEGFVRRTLGDEIFERLVEPFCSGVYAGDPSKLSMRAAFGKLVEFEETGDGSLLRGVFRYVMNKRRERRTGGAKDGDTVPLNETAKAPKSSSGPTVSSFEGGIEILPKAIAQKLGDRVRLGLRLVRIDPTQLADGTTAYRLSYRRMSHQGDDDSSRTAGAVPRTAEGDVAAGDEDAVVEVVAKKVVLTTPAFDAADILSRSGLVAAANPLKEVDYPPVALVVLSYDVDSISAIHRVSHVAHGLSGFGQLHPRPEGLRTLGTIYGSTLFPNRSPVARTTLLNFVGGSTDRAVGSADPMALAMEVDLDLKKSGLIREGAAKPEVLGVKVYPKAIPQFDIGHLDRVEKAKMMLKNERGGADWSGVKLAGNYVCGVAVGRCIEFGFEIAENLAQELARKK

SEQ ID NO: 604 - skipped

SEQ ID NO: 605 - protein, 544 aa, Sorghum <genus>; identical to SEQ ID NO: 28

SEQ ID NO: 606 - skipped

SEQ ID NO: 607 - protein, 536 aa, Oryza sativa
MAAAAAAMATATSATAAPPLRIRDAARRTRRRGHVRCAVASGAAEAPAAPGARVSADCVVVGGGISGLCTAQALATKHGVGDVLVTEARARPGGNITTAERAGEGYLWEEGPNSFQPSDPVLTMAVDSGLKDDLVFGDPNAPRFVLWEGKLRPVPSKPGDLPFFDLMSIPGKLRAGLGALGVRAPPPGREESVEDFVRRNLGAEVFERLIEPFCSGVYAGDPSKLSMKAAFGKVWRLEDTGGSIIGGTIKTIQERGKNPKPPRDPRLPTPKGQTVASFRKGLTMLPDAITSRLGSKVKLSWKLTSITKSDNKGYALVYETPEGVVSVQAKTVVMTIPSYVASDILRPLSSDAADALSIFYYPPVAAVTVSYPKEAIRKECLIDGELQGFGQLHPRSQGVETLGTIYSSSLFPNRAPAGRVLLLNYIGGSTNTGIVSKTESELVEAVDRDLRKMLINPKAVDPLVLGVRVWPQAIPQFLIGHLDHLEAAKSALGKGGYDGLFLGGNYVAGVALGRCVEGAYESASQISDYLTKYAYK

SEQ ID NO: 608 - skipped

SEQ ID NO: 609 - protein, 505 aa, Amaranthus; identical to SEQ ID NO: 6

SEQ ID NO: 610 - skipped

SEQ ID NO: 611 - protein, 506 aa, Arabidopsis
MELSLLRPTTQSLLPSFSKPNLRLNVYKPLRLRCSVAGGPTVGSSKIEGGGGTTITTDCVIVGGGISGLCIAQALATKHPDAAPNLIVTEAKDRVGGNIITREENGFLWEEGPNSFQPSDPMLTMVVDSGLKDDLVLGDPTAPRFVLWNGKLRPVPSKLTDLPFFDLMSIGGKIRAGFGALGIRPSPPGREESVEEFVRRNLGDEVFERLIEPFCSGVYAGDPSKLSMKAAFGKVWKLEQNGGSIIGGTFKAIQERKNAPKAERDPRLPKPQGQTVGSFRKGLRMLPEAISARLGSKVKLSWKLSGITKLESGGYNLTYETPDGLVSVQSKSVVMTVPSHVASGLLRPLSESAANALSKLYYPPVAAVSISYPKEAIRTECLIDGELKGFGQLHPRTQGVETLGTIYSSSLFPNRAPPGRILLLNYIGGSTNTGILSKSEGELVEAFLVGHFDILDTAKSSLTSSGYEGLFLGGNYVAGVALGRCVEGAYETAIEVNNFMSRYAYK

SEQ ID NO: 612 - skipped

SEQ ID NO: 613 - protein, 504 aa, Nicotiana; identical to SEQ ID NO: 20

SEQ ID NO: 614 - skipped

SEQ ID NO: 615 - protein, 502 aa, Glycine; identical to SEQ ID NO: 11

SEQ ID NO: 616 - skipped

SEQ ID NO: 617 - protein, 401 aa, Cucumis
SFQPSDPILTMVVDSGLKDDLVLGDPDAPRFVLWNGKLRPVPAKPNDLPFFDLMSIGGKIRAGFGALGIRPPPPGREESVEEFVRRNLGNEVFERLIEPFCSGVYAGDPSKLSMKAAFGKVWRLEQNGGSIIGGTFKALQERNKTTKPPRDPRLPKPKGQTVGSFRKGLTMLPNAISTCLGSKVKVSWKLSSISKVDDGGYSLTYETPEGLVSILSRSVIMTVPSYIAGTLLRPISGKAADALSKFYYPPVASVTISYPKGAIRKECLIDGELKGFGQLHPRSQGVTTLGTIYSSSLFPNRAPDGRVLLLNYIGGATNTGILSQTESELIEVVDRDLRKILINPNAEDPLPLSVRVWPQAIPQFLIGHLDVLDTAKAGLREAGMEGLFLGGNYVCGVALGR

SEQ ID NO: 618 - skipped

SEQ ID NO: 619 - protein, 506 aa, Oryza sativa; identical to SEQ ID NO: 37

SEQ ID NO: 620 - skipped

SEQ ID NO: 621 - protein, 574 aa, Oryza sativa
MLSPATTFSSSSSSSSPSRAHARAPTRFAVAASARAARFRPARAMAASDDPRGGRSVAVVGAGVSGLAAAYRLRKRGVQVTVFEAADRAGGKIRTNSEGGFIWDEGANTMTESELEASRLIDDLGLQGKQQYPNSQHKRYIVKDGAPTLIPSDPIALMKSTVLSTKSKLKLFLEPFLYEKSSRRTSGKVSDEHLSESVASFFERHFGKEVVDYLIDPFVAGTSGGDPESLSIRHAFPALWNLENKYGSVIAGAILSKLSTKGDSVKTGGASPGKGRNKRVSFSFHGGMQSLIDALHNEVGDGNVKLGTEVLSLACCCDGVSSSGGWSISVDSKDAKGKDLRKNQSFDAVIMTAPLSNVQRMKFTKGGVPFVLDFLPKVDYLPLSLMVTAFKKEDVKKPLEGFGALIPYKEQQKHGLKTLGHPASCIELNIQINLATLLYFFSGTLFSSMMFPDRAPNDQYLYTSFIGGSHNRDLAGAPTAILKQLVTSDLRKLLGVEGQPTFVKHVHWRNAFPLYGQNYDLVLEAIAKMENNLPGFFYAGNNKDGLAVGNVIASGSKAADLVISYLESCTDQDN

SEQ ID NO: 622 - skipped

SEQ ID NO: 623 - protein, 550 aa, Amaranthus tuberculatus
MSAMALSSSILQCPPHSDISFRFFAHTRTQPPIFFGRPRKLSYIHCSTSSSSTANYQNTITSQGEGDKVLDCVIVGAGISGLCIAQALSTKHIQSNLNFIVTEAKHRVGGNITTMESDGYIWEEGPNSFQPSDPVLTMAVDSGLKDDLVLGDPNAPRFVLWNGKLRPVPSKPTDLPFFDLMSFPGKIRAGLGALGLRPPPPSYEESVEEFVRRNLGDEVFERLIEPFCSGVYAGDPAKLSMKAAFGKVWTLEQKGGSIIAGTLKTIQERKNNPPPPRDPRLPKPKGQTVGSFRKGLIMLPTAIAARLGSKVKLSWTLSNIDKSLNGEYNLTYQTPDGPVSVRTKAVVMTVPSYIASSLLRPLSDVAADSLSKFYYPPVAAVSLSYPKEAIRPECLIDGELKGFGQLHPRSQGVETLGTIYSSSLFPGRAPPGRTLILSYIGGATNLGILQKSEDELAETVDKDLRKILINPNAKGSRVLGVRVWPKAIPQFLVGHFDVLDAAKAGLANAGQKGLFLGGNYVSGVALGRCIEGAYDSASEVVDFLSQYKDK

SEQ ID NO: 624 - skipped

SEQ ID NO: 625 - protein, 547 aa, Alopecurus myosuroides
MLTSATTPSSSSASSRASTRFASSSRPRRTAYARGRRLRPVLAMAASDDPRARSVAVVGAGISGLVAAYRLSKSGVRVTVFEADDRAGGKIRTNSDSGFLWDEGANTMTESALEASRLIDDLGLEDRLQYPNSQHKRYTVKDGAPALIPSDPIALMKSSLLSTKSKFKLFLEPFLYDKSSTKSSKKVSDEHISESVGSFFERHFGKEVVDYLIDPFVAGTSAGDPESLSIRHAFPGLWNLEKKYGSIIVGAIMSKLTAKGDKKGSAVSGKGRNKRASFSFHGGMQTLVDALHKEVGDGNVKLGAQVLSLACICDGLSASDGWSISVDSKDASNKELTKNHSFDAVIMTAPLSNVQRMKFTKGGAPFVLDFLPKVDYLPLSLMVTAFKKEDVKRPLEGFGVLIPYKEQQKHGLKTLGTLFSSMMFPDRAPNDQHLFTTFVGGSHNRDLAGAPTSILKQLVTSDLGKLLGVEGQPTFVKHIHWRNAFPLYGHDYDSALEAIGKMESDLPGFFYAGNNKDGLAVGNVIASGSKTADLVISYLESGIKQDN

SEQ ID NO: 626 - skipped

SEQ ID NO: 627 - protein, 531 aa, Alopecurus myosuroides
MVGATMAIATVTAALPLRVRVPGRSRRGQARCAVASDATEAPAAPSARLSADCVIVGGGISGLCTAQALATKYGVSDLLVTEARARPGGNITTVERPDEGYLWEEGPNSFQPSDPVLTMAVDSGLKDELVFGDPNAPRFVLWEGKLRPVPSKPGDLPFFDLMSIPGKLRAGLGALGIRPPPPGREESVEEFVRRNLGAEVFERLIEPFCSGVYAGDPSKLSMRAAFGKVWRLEENGGSIIGGTIKAIQDKGKNPKPPRDPRLPAPKGQTVASFRKGLAMLPNAIASRLGSKVKLSWKLTSITKSENQGYVLGYETPEGVVSVQAKSVIMTIPSYIASDILRPLSSDAADGLSKFYYPPVAAVTVSYPKEAIRKECLIDGELQGFGQLHPRSQGVETLGTIYSSSLFPNRAPAGRVLLLNYIGGATNTGIVSKTESDLVEAVDRDLRKMLINPRAADPLALGVRVWPQAIPQFLIGHLDRLDAAKSALVRSGCSGLFLGGNYVAGVALGRCIEGAYDSASEVSDFLNKYAYK

1. A method for controlling undesired vegetation at a plant cultivation site, the method comprising the steps of:
a) providing, at said site, a plant that comprises at least one nucleic acid comprising a nucleotide sequence encoding a protoporphyrinogen oxidase (PPO) polypeptide which is resistant or tolerant to a “PPO inhibiting herbicide”;
b) applying to said site an effective amount of said herbicide,
wherein the PPO inhibiting herbicide is a phenylpyridine of formula (I) [chemical structure]
wherein the variables have the following meanings:
R¹ halogen, C₁-C₄-haloalkyl or SO₂CH₃;
R² H, CH₃ or NH₂;
R³ halogen;
R⁴ H or halogen;
R⁵ halogen or CN;
R⁶ H or CH₃;
R⁷ C₁-C₆-alkoxy, C₁-C₆-haloalkoxy, C₃-C₆-alkenyloxy, C₃-C₆-alkynyloxy;
R⁸ OR⁹, SR⁹, NR¹⁰R¹¹, NR⁹S(O)R¹⁰, NR⁹S(O)₂R¹⁰, NR⁹S(O)NR¹⁰R¹¹, or NR⁹S(O)₂NR¹⁰R¹¹,
wherein
R⁹ is hydrogen, C₁-C₆-alkyl, C₃-C₆-alkenyl, C₃-C₆-alkynyl, C₁-C₆-halo-alkyl, C₃-C₆-haloalkenyl, C₃-C₆-haloalkynyl, C₁-C₆-cyanoalkyl, C₁-C₆-alkoxy-C₁-C₆-alkyl, C₁-C₆-alkoxy-C₁-C₆-alkoxy-C₁-C₆-alkyl, di(C₁-C₆-alkoxy)C₁-C₆-alkyl, C₁-C₆-haloalkoxy-C₁-C₆-alkyl, C₃-C₆-alkenyloxy-C₁-C₆-alkyl, C₃-C₆-haloalkenyloxy-C₁-C₆-alkyl, C₃-C₆-alkenyloxy-C₁-C₆-alkoxy-C₁-C₆-alkyl, C₁-C₆-alkylthio-C₁-C₆-alkyl, C₁-C₆-alkylsulfinyl-C₁-C₆-alkyl, C₁-C₆-alkylsulfonyl-C₁-C₆-alkyl, C₁-C₆-alkylcarbonyl-C₁-C₆-alkyl, C₁-C₆-alkoxycarbonyl-C₁-C₆-alkyl, C₁-C₆-haloalkoxycarbonyl-C₁-C₆-alkyl, C₃-C₆-alkenyloxycarbonyl-C₁-C₆-alkyl, amino, (C₁-C₆-alkyl)¬amino, di(C₁-C₆-alkyl)amino, (C₁-C₆-alkylcarbonyl)amino, amino-C₁-C₆-alkyl, (C₁-C₆-alkyl)amino-C₁-C₆-alkyl, di(C₁-C₆-alkyl)amino-C₁-C₆-alkyl, aminocarbonyl-C₁-C₆-alkyl, (C₁-C₆-alkyl)aminocarbonyl-C₁-C₆-alkyl, di(C₁-C₆-alkyl)aminocarbonyl-C₁-C₆-alkyl,
—N═CR¹²R¹³, wherein R¹² and R¹³ independently of one another are H, C₁-C₄-alkyl or phenyl;
C₃-C₆-cycloalkyl, C₃-C₆-cycloalkyl-C₁-C₆-alkyl, C₃-C₆-heterocyclyl, C₃-C₆-heterocyclyl-C₁-C₆-alkyl, phenyl, phenyl-C₁-C₄-alkyl or a 5- or 6 membered heteroaryl,
wherein each phenyl or heteroaryl ring can be substituted by one to four substituents selected from R¹⁴ or a 3- to 7-membered carbocyclus,
which carbocyclus optionally has in addition to carbon atoms one or two ring members selected from the group consisting of —N(R¹²)—, —N═N—, —C(═O)—, —O— and —S—, and
which carbocyclus is optionally substituted with one to four substituents selected from R¹⁴;
wherein R¹⁴ is halogen, NO₂, ON, C₁-C₄-alkyl, C₁-C₄-haloalkyl, C₁-C₄-alkoxy or C₁-C₄-alkoxycarbonyl;
R¹⁰, R¹¹ independently of one another are R⁹, or together form a 3- to 7-membered carbocyclus,
which carbocyclus optionally has in addition to carbon atoms one or two ring members selected from the group consisting of —N(R¹²)—, —N═N—, —C(═O)—, —O— and —S—, and
which carbocyclus is optionally substituted with one to four substituents selected from R¹⁴;
X O or S; and
Y O or S;
including their agriculturally acceptable salts, and wherein the effective amount of said herbicide does not kill or inhibit the growth of the herbicide-tolerant plant of a).

2. The method according to claim 1, wherein the herbicide resistant or tolerant PPO polypeptide comprises one or more of the following motifs 1, 2, and/or 3:
a. Motif 1: SQ[N/K/H]KRYI, wherein the Arg at position 5 within said motif is substituted by any other amino acid;
b. Motif 2: TLGTLFSS, wherein the Leu at position 2 within said motif is substituted by by any other amino acid;
c. Motif 3: [F/Y]TTF[V/I]GG, wherein the Phe at position 4 within said motif is substituted by by any other amino acid.

3. The method according to claim 1, wherein the herbicide resistant or tolerant PPO polypeptide comprises a variant of the amino acid sequence of SEQ ID NO: 1, 2, 3, 4, 5, 6, 7, 8, 9, 10, 11, 12, 13, 14, 15, 16, 17, 18, 19, 20, 21, 22, 23, 24, 25, 26, 27, 28, 29, 30, 31, 32, 33, 34, 35, 36, 37, 38, 39, 40, 41, 42, 43, 44, 45, 46, 47, 48, 49, 50, 51, 52, 53, 54, 55, 56, 57, 58, 59, 60, 61, 62, 63, 64, 65, 66, 67, 68, 69, 70, 71, 72, 73, 74, 75, 76, 77, 78, 79, 80, 81, 82, 83, 84, 85, 86, 87, 88, 89, 90, 91, 92, 93, 94, 95, 96, 97, 98, 99, 100, 101, 102, 103, 104, 105, 106, 107, 108, 109, 110, 111, 112, 113, 114, 115, 116, 117, 577, 579, 581, 583, 585, 587, 589, 591, 593, 595, 597, 599, 601, 603, 605, 607, 609, 611, 613, 615, 617, 619, 621, 623, 625, or 627, which variant comprises one or more of the following substitutions:
a. the amino acid corresponding to Arg128 of SEQ ID NO: 1 is substituted by by any other amino acid.
b. the amino acid corresponding to Leu397 of SEQ ID NO: 1 is substituted by by any other amino acid.
c. the amino acid corresponding to Phe420 of SEQ ID NO: 1 is substituted by by any other amino acid.

4. The method according to claim 1, wherein the herbicide resistant or tolerant PPO polypeptide comprises the amino acid sequence of SEQ ID NO: 265, 266, 267, 268, 269, 270, 271, 272, 273, 274, 275, 276, 277, 278, 279, 280, 281, 282, 283, 284, 285, 286, 287, 288, 289, 290, 291, 292, 293, 294, 295, 296, 297, 298, 299, 300, 301, 302, 303, 304, 305, 306, 307, 308, 309, 310, 311, 312, 313, 314, 315, 316, 317, 318, 319, 320, 321, 322, 323, 324, 325, 326, 327328, 329, 330, 331, 332, 333, 334, 335, 336, 337, 338, 339, 340, 341, 342, 343, 344, 345, 346, 347, 348, 349, 350, 351, 352, 353, 354, 355, 356, 357, 358, 359, 360, 361, 362, 363, 364, 365, 366, 367, 368, 369, 370, 371, 372, 373, 374, 375, 376, 377, 378, 379, 380, 381, 382, 383, 384, 385, 386, 387, 388, 389, 390, 391, 392, 393, 394, 395, 396, 397, 398, 399, 400, 401, 402, 403, 404, 405, 406, 407, 408, 409, 410, 411, 412, 413, 414, 415, 416, 417, 418, 419, 420, 421, 422, 423, 424, 425, 426, 427, 428, 429, 430, 431, 432, 433, 434, 435, 436, 437, 438, 439, 440, 441, 442, 443, 444, 445, 446, 447, 448, 449, 450, 451, 452, 453, 454, 455, 456, 457, 458, 459, 460, 461, 462, 463, 464, 465, 466, 467, 468, 469, 470, 471, 472, 473, 474, 475, 476, 477, 478, 479, 480, 481, 482, 483, 484, 485, 486, 487, 488, 489, 490, 491, 492, 493, 494, 495, 496, 497, 498, 499, 500, 501, 502, 503, 504, 505, 506, 507, 508, 509, 510, 511, 512, 513, 514, 515, 516, 517, 518, 519, 520, 521, 522, 523, 524, 525, 526, 527, 528, 529, 530, 531, 532, 533, 534, 535, 536, 537, 538, 539, 540, 541, 542, 543, 544, 545, 546, 547, 548, 549, 550, 551, 552, 553, 554, 555, 556, 557, 558, 559, 560, 561, 562, 563, 564, 565, or a variant thereof.

5. The method according to claim 1, wherein the herbicide resistant or tolerant PPO polypeptide comprises the amino acid sequence of SEQ ID NO: 240, 241, 242, 243, 244, 245, 246, 247, 248, 249, 250, 251, 252, 253, 254, 255, 256, 257, 258, 259, 260, 261, or 262.

6. The method according to claim 1, wherein the plant comprises at least one additional heterologous nucleic acid comprising a nucleotide sequence encoding a herbicide tolerance enzyme.

7. The method according to claim 1 wherein the phenylpyridine of formula (I) is applied in conjunction with one or more additional herbicides.
